United States Patent Application Publication US 2006/0183128 A1 - sequence listing, part 2

SEQ ID NO: 205 - DNA, 4647455 bp, Homo Sapiens (residues 1,549,153-3,098,304 of 4,647,455)
  unsure (4267840): unknown base
cactggtctgtgtgtctgcttttgtaccagtaccatgctgttttggtcatggtagccctgtagtttgaagttaggtaatgtgatgcctccacctttgttctttttgtttaggattgccttgactactcaggctttttggttccatatgaattttaagttttttctagttctgtgaaaaatgtaattgatagtttgataggaatagcattgaatctataaattgctttgggtagtatggccactttaatgatattgattcttcctagccatgagcatggaaagtttttccatttgtttgtgtcatctctgatttctttgagcagcgtttgtgattctcattgtagagatcctttacttccttggttagctgcattcctgggtattttattcttttttgtggcaattatgaatgggattgtgctcctgatttggctcttggcttggcgactgtgtataggaatgttagtgatttttgtacactgattttgtctcctgaaactttgctgaaattatcagatgaaggaccttttgggctgaggctatggggttttctagatatagaatcatactgtctgcaaacaaggatagtttgacttcctctcttcctatttggatgccctttattatttctgttgcctgactgctgtgatcaggactttcaacactatattgaataggagtggtgagaaagggcttccttatcctgtgccacttttcaaggggaatgcctgcagcttttgcccattcagtatgatgttggctgtgggtttgttatagttggctcttattattctgagttatgttccttcaacacaagatgggaagctccccaaatccacatctcttgcttgtgggggagccatcctcagcacatcggccctacccaacccacagtagataccaacatccctatgatggatgagctatggtggagtccccccaaccccagagtgagaattggcccccgatggggacttagggagggctgagttggcgagctgtgggaggtcatcatcagtggggctcaagctctcccctccaagctccaaggatctctgcagccacaggacgcattccttctccacttagatcttgtctgtgaagtatccaattgccttccatttctacttggtgtagaatgtagggggcaatgaatgaaactgccgcatattgcagagggtccatgtccaagcacaggcagttgtaacggtagtagccacaccaccagtacctgtggttcctgctagcccctccactgcccaggccagacagtgtcagtctggcagatgtacccccaaggactctctctcatggtgtctgctcctctgccccacccttctgatctcacagcttctccttaggtgacattcacactttagacaaagttgtttggtcccctgattatgatctcctttacttgctgtcagctctgcctgggaagaggtctatgctcagttccaggatacatggaaaaggcagtggatgggcaggtacagtcttgggctttaccatgaactgtgttgtttagtcaagttgtttaacctccactctgttcatcttgtatatatgggtggggggtgaagactatgagcccacaggtctgcttctgtgctcactgtaacagattcctaagtgcaagtccctgaaacaggatcacagtacacaacattaacataagagggtacattatgcacggtacagctttccttgaggttctagagaatgcaaaccttaacattaacaagtaccaaacctctgctgaaaaatcctctaatgaatttcaaggttaaatataaataaactgtgggattgttctgcctagagtagccacaccctcctcgggggtcccacagtccacaggctcaaactcctcatccaacagttacatgctccaccaactttcagactgtctctcccagtaggcagtgagcccctagaaggcagggactatgtaacggtgacctggcaactttgttgaacagctgctcctatcaggatcagttcgtaaaaagccaagcactgctcagccttttattatgcctcttactgatttatgccttcatttggcattcaagaacttgctccaatagtgccaaacagttgggagatatttactacaaattattaaaactgcagtctatcctctgaaccaactgtgctcaatcccaccacacatcttgctgctccctaacttctagctgcttggaaagtctcatattcttcatctactcaaatcatacacatccctcgggttccatgcaaagttccatctcattcatgaaactccctgaccactgggatatctggcccatgaacttgagcaaactatttcttctgcatctcatttggcatttgaggagggactgttctctgacgtctcctggtatgcctcacagagtcagtaaagtgtttccagacctataggtaccaccccatattgttagctctttgaggatacacactaggttatacttttctggttctccaccctaagcacccaaaaggcagatggtaggtacatctcagctccaaagagactgctgaagactgaatgaattaatgacacacagagaaactgaccctggtgagcagcctgggccagttcactcacgtgactgtgggggctggcaagtacataattttcaggttagactggcaggctggagacccagggaagagctgacactgcagcctgaggccacaggtagcagtgttgctgggttgctgcattctttactgtgagatttagaaaaactgtcattatcattatcctaatattgtcaaaacttgtaggcagcctatttgctgtttttggttcttattgttagtgtgttgttattcctgtggaaatcataattgtgcagcgttttgatatctatgaattcaaaaacttaaacagaatattaagaacaaactaataataaagtgacaaactttggatacctttttaacattgtttctaaatattgtaaacatgaatcttctggacctcagagggaacaaggaagcaatgatattaataatgaatcataatctggaacacctgatattgtacacaaactataacaactggaaatgcctttgcaactgcataagagttagttcaaagaaacaataatttgcatttctaaaatttaaaaaatccccaataacttttgacaaaactcacagatggcttattattgctagcaatgtaaatattggatgcaaatcatgctcaaaagctgtgtgaatagccaaaagtgctaagcacattctgtcagtgctcataattcaaggaaaacattagcaaaattcaaagaaaaaaacttgaaaaatattaagaacagctttgtacaataaagtatttgaaaaaagcaacaaacagtggaaaaatgccatcagatgttagtatacagtttacccaaatgtgtaattaaatagagcattttacatcattaagtagaggcttttaaacaattatacatagtgcatatcattgcagtatagattaatggttctgctggttgcaaaccatattctacataagacaacttttggaaaatttattaatccaagcaataaatcattatcagtgaagtgtcaaccatttcacaaaatgtatttaagttttagttccttaaatactaaatgtaagacttacaggaaaatgggtttttgttgatctgaggaacttataccaaccttactcatcagtgcccaagaaaaatagctttaatgtgagacagttgtatgatggtacagatagtgccagtatatgcaacgaagaaagttcaggtttcaccaaaattttgcaaaatttcggggtttaaaaatctgtttatcgcagaagtcacattgactgtctcacatttactcttcctcgtgtcctgatcctgctgacttgtccacatgggcaactacgaagctggcacaactatacttctttgttcactttggtcaccaccatttgttctgctgttgggctgcccatgtgtaggcaggtttcacgaaaatatcaggttccctaagcaacatgaactgggaggctcagagagggatttccctagtcactgacttactgagggattgactcaagattcccaggcactagacagaagcagtcgggaaaggaatcatttcctgattgcctgtgggggaaaaagaaacttttttggatagaacagtctggatggactctaacacagtaaaaagtgaaggcagtgcattcttcagaagggcggcagatggggcaccacgcatccccacagaggggctgtcctgcggtccttgcaggagttgccaggctcccaaaatctcctcctgctgctatccccaccctgcctgaaaagaggtgaggaggatgatggggagggagtcaaacagacttgggataggaggagtgagtgcgctggtaaaaccaattacttagctaaacctttggctaaaactctaggaagggaggcacaaaatgggaaagtgtgggttttttttttttgcttctctaggtgaaggtttaaattaacttcagcatgggtaaaactattctttccttcttttttctctcccagagttctcaccacctcctcccaggctaaatccttcatgttgcaggagacagagaatcccaggtgagacccggactttttctcctccctcccttccttttttcaccgtgttcaggataaattatcttggttttgtttctggagggaaaagggcagagaggccctgacttgaatctcaatcacatttctgcacacagtacctgaggagacagaatagcagaggggtgggaacaattaacattgctttatgggctttagaatggagaaaaaataattcccactcttttttcttttacccaaatccaacttcagttttctctccaactctctaaaaccaccaccaatactattatcacatcatgtgtagctacttggggggtggtgaaaggctgagtacgcatcatgttcaggtagtagggtgttaaacgaaatagttcctcacagcaatgcccaaagtcatccttggtcacaataaaggagaataaagggaaaaaagtatgattattgtattagattgtggggttgcaggtgagttttttttttccattttaaaaattattttgtggttataatgatgatgtcaatttttaaaaaaataaaagaatggaaaaagttgacttgggatttcataatgcaaagaaaaaagcaaaacaaaaaagaacaacaaaaagcaaacaaaacagatttacatgtaatacctaatttaatcccttcataactctgtgaagtgggtcagtattgacgggtcagcttaactaacagatattaggaatgagatccaaaacaaccagccatggtcgcacagcttgtggaacccaggttctttgacactcagcccagtgttccacctgcaatggcaacctaagtgaggagggggcctcagagatgaggtggtcgacccttacaatgttgatattctccatgctttctcagagcaagtggctgaatctctttcgtgacagagaactcaccacctaccaaggcagcccattttattaagtctaacttttaaaaaagatacttatgatgagcacaattctgtctctctcatactctatggaaacgaccaatttctgacctctatgtcacaaagagtaagtttagttcttcacataatagccctccaaatatttgaaatctctagtcatagccagatatattgcatcaaaataaatggctattttctgcaggagggttggtccaaatgtcctagcctaccattacctgaagcaagaagtcctccctattttttgaagaactatatttatttgctcaaatcatatttattaggggcctgctatctgccaggcagtggggatgcagcgatacacaggtcaaataggcatttggagtgtggaagtgggtgcccaccctagtcggggagcatctcaggatgtcctcctcaaggagatgacatgtcaactgagcccagaggacaacaggagttgacagggaagagtatttcctagagcgagaaactggaggcagctgtagtgaggtgctgatgggttctggccaccacctggaccacctagatttgatgtttctccacccccacttagttgtgtgaccctggacaagttcctcacccactacgtgctttagaaccctcactgtgaaatgggagatgtgataggaatgttgtgaggattgtttgagtgaatacatgcaaaggacttaggacaagcctggcacatagttaatgctcaatcaatgttttctctcgcaactggagggaaacaaggtagtgggcaggaagggggagtgcgcagacagttcctgctaagccttgtaagttaccatggcccagcactgtaaccagagaagtgaggatgagacttccactttgagaaaggcctctctggccgcagcatgtaaaggaatgggaggggattagaatgtgtgtgcacggactaggtgggagctaactgcagggccagcatctgtggcacagattatctctcttcatcctgaacccctccctcttcccgtctcgaatccttttcccactcctgaccacatcctccacctgtcagaaagtcacagttaaggaagagatttccgagcacaccttggacagaagtcatgatgatggggcccatgactggcaacctgctgggagaggtggcctgcagtgtgtctggagtacatgggggaccccgggagcatcttctgtgtctgtggcccctggcaggcctgcatcacttggtgctatgccactatcagatccaccacaggagccatgtgctattcattccacaaggagccctttcaacagggagacatcaggcccaactggattctagccaccttggtctccagtctcctactctcaagcccatgagtgacaattcagcacaggaaatttggttctgtgagcagcatctattggcaggatgaccagcaattcttgtgtgtggtttgcaaagatcttaacggagaacaaatgttacttagtgctgcagaaggagaacaatgctaggttccacaaggtagtctgtccttttgctgtcttgtctacaccagagaacctttggttgacttgctttaatattggcttcagtcctattacaaaacaacaacaaattattgtattctaaacacagttctaaatgcaacaatagtttatcttttaatcctggattatacagtttacaattacttgcaaatgcatagtacctcactccaaaaaacctcaggcatccaggcatcacaatttctctatctgcatgacacagaaacttccatgtcactagaggatttcacaatccatatatgaatcccctgaagacttcttggtgtgaaggaaacatcactggacacaacactgaaaatggcaatagtccaggcatggtggttcatgcctgtaatcccagcactttgggaggcttacgcgggtagatcacctgaggtcaggagtttgagactagcctggccaacacagtgaaaccccatttctactaaaaatacaaaaattagccaggtgtggtggtgcatgcctgtagtcccagctaccagcgaggctgaggcaggagaatcacttgaatcccgtaggctgaggttctggtgagctgagatcacgccactgcactccagcctgggcaacagaacgagactccgtctcaaaaaaaaaaaaaaaggcaacaaaagccctggatagatagggtttttttaggtgagctataacatctgggcaaataaaaacactatgttattcctagaaaaattatagaaatctaacttaaccttgtcaacatggggattcattatcttatttagcaaactaaaggaacaataatgtaactgcacctcaggtacaactggaaccagggatttgaatgcaactaagacttcccatcttttattttctcttctctagattagctcaattttttgcaacacatttcctgtatgaactataactatagccatttctagattaatacctcttgtcagcaaagcaagacagaggtattctctggtcatgaagaaaattccagaaaagagctctgaatcaaaggccaaaatcctggcatatctggtgctgtgcagagctgagagactggctgaagagtgtgccagcagtaagctatcctaggcatagggcctgactagaaatcaaagaccctaatgtagcagtattgcatcatctatagcctagattatgctgcaatgatatacaactcccgtatctcactggtataaaccaaaaagatttcttttacatgctacctgttcatcaggagttgctgagggggtcacttggagatccaggctcgccaagcagccactgtcttcagcaccagctaatgccctgctagtgggcaaagagggagctctggaagaacataaaccagcagttaaattcccagtccagaagaaatacatatcacccctactaacacctcattacagggcacagatgatgacaataatgacctctcaggcttaaggacccttcaactctgagagagggtatctagtggtcacctagctactatcctgtctttccctcaggcagaagtgggtgtggtttccaacacccccagctgtgtcccggtccgtgacaacaaaatctttgtaatctaaagtttgaagcatttcagaggtcagaagggtgtttgctgttacgactcttgctctcacttctacctgacaagagagaagaatttgtatagactgttagacatgttactattttttgaaagcactaggtatttgggacaaggtcaacatgtttccctatcagaaatcactcatagatatgttctttgaggtcaggaattctatgaaataaaaataaagaaaattattgagcctctcttggatgccagcaccatgctcagtgctttcatttttttcagtatactcacattactgattatccttcattttacttatgatcaaagcaagagttgaaggaatgtccttggttcaaggctacaccctaggagacacagtcagaatttaaatccagctttctttcatttgaaagactgtgctctgtgctggaccacactgtacagtttttaaagtgatctaacaacgacagcatccatcagtgaactctgagtctaccaaacagaaattgctcttaatgggttcatctaatggcagggccggctcaaggcaaaattttttgcccccatccctctttttcattcgacacgattttgctgtatcatccaggctggactgcagtggcgtggtcacagctcactgcagcctcaaactcctggctcaaatgatcctccctccttatcttcctgagtagctgggactatgggcgcatgccaccatacctgctaatgtttaaaatttttgtaaagatggggtctcactatgttccctaagatggtctcaaattcctggcctcaagcaatcctcctgccgcaaatctcctgaagtgctgggattataggtagaagccacaatgcccagtccccttctccctgattaaaaatatatttttttattttttttcactattcaacttccattttaggttcaaggggtacatgtgtaggttcgttatatgggtaaattacaatgttgtgggggttgtgtatacagataattttgtcgcccaggtaatcagcataatacccaaaaggtagtttttaagtcttcaccctcctttcaccctccaccctcaagtaggtcctggtgtctgttgctcccttgtgtccatgtgtactcgatgtttagctcccatttaaaagtgacaacatacagtatttggttttctgttcctgcattaattgtcttaaggaatggcctccagctccatccatgctgctgcaaaggacattatgtcattcttcgtggttgtgtagtattctattccacggtgtatatgtacattttcttttttttttttttttgagacagtctcgccttgtcacctaggctggagtgcaatggcgcgatctcggctcactgcaacctctgcttcccaggttcaaacgattctcctgccttgagtagctgggattacaggcacctgccaccatgtccagctaatttttgtatttttagtagagacaaggtttcaccatgttggccaggctggtctcaaactcctgacctcgccgaactccacccgaatcggtctcccaaagtgctaggattacaggcgtgagccaccgaacctgggcatctaggttgattccgtatctttgccattgcgaatagtgccgcagtgaacatacatgtgcgtgtgtctttaggtagaactatttatattcctttggggatatacccagtaaagggattgctgggttaaacggtagttttaagttctctgagaaatttccagactgctttccacaatggctgaactaatttacattcccatttgcagtgtataagcattctcttttttctgcaacctcatcagcatcagttagtttttgacttttttaataatagcctttctgactggtgtaagatggtatctcattgtggttttgatttgcattcccctaattagggatattaagcattttttttcttatgtttcttttgaaaagtgttcatgtcctttgcccattttttaatggggttcttttttgcttactaagttccttatagattctggttattaaacctttgtcagatgcacagtttgcagatgttttctcccattctgtaggctgtttactctgttgacagttccattttctgtgcaggagttctttagtttaattaaggcttatttggcaatttttggttttgttgcagttgcttttggagtcttcatcatgaagtctttgccagggctgatgctcaaaatggtatttcctaggttttcttctagtattttcatagttttaggttttacatttaagtctttaatccactttgagttgatttttatatatggcgaaagataggggttcagtgtcattcttctgcctatggctatccagttatcccagcaccatttattgaatagggagttctttccccattgcttgttattgtcaattttgtcaaagatcagatggttttaggtatgtggctttatttctgagttctctaatctgctccattagtctatgtgtctgtttttgtaccagtgccatgctgtcttagttactgtaacctcataatttgaagacaggtagtgtgatgcctccagctttgttctttttgctcaggattgctttggctatttgggctccttcttggttccatatgaatttttgaattttttttcctaactctgtgaaaaatgtcattggtagtttgacactgaatctgtaaattgctttgactagtatggcagttttaacaacaatattaattcttcctatccaggagcatggaatgttttcccattggtgtaatctgatttctttgggcagtgtcttgtaaaattctcattgcagagattgtttacctctttggctagctgtattcctaggtattttattcttcttgaggctactgtgaatgaaactgcattcttcacttggttctcggtttagatgttattggtgtatagaaatgctactgatttttgtaaacttattttgtatcctgaaactctgctgaagttctttttcagatctagaagccctcaggaagagaccatggagttttctaggtatagaatcattatctatgaagagagataatttgacttcctctcttcctatttggatgccttttatttctttctctcacttgactgctccaaatagaacttccagtactatgttgaataggagtagtgagagtgggcatccttgtcttgttccagttcctaaagagaatacttctagcttttgccaattcagtattatgttggctttgggtttgtcagagatagcttttattattttgaggactataacttcaaacctagtttgttgagggtttttaacatgaatgaatgtttaattttaccaaaagccttttctgcatctattaaggtatcatgtggtttttgtttttagttctctttatgtgatgaatcacatttattgatttgggtaagttgagccaactctgcactccagggataaagcctacttgatcacaatggattagctttttggtgtgttgctggatttcatttggtagtattttgtggaggatttttgcatatatgttcatcagggatattggcctgaagttctttttttctgttgtgtctctgccaggttctggtatcagaatgatgctggtctcacagactgagttagggaggtgtccctctttctcaattttttggaatagtttcggtaggaatgataccagttcttctttatatgtctggtagaatttggctgtgaatccatctggtccaggactttttctggttagtaggctttttattactgattcaattttggaacttgttattggtctgtttggggtttcaatttctggttcaatcttgggaggttgtatgttcccaggaatttatccattcttctaggttttctagtttgtgtgcagaggtgttcataatagtctccaagcggtttttgtatttttgtgtggtcagtgacaacgtcccctttgtcattcctgattgtgtttatttagattatctcccccctcctttttttattagtctagttagtgcctatcaaccttatttattctttcaaagaaccaacttttgctttctttgattttttgtacggtttttctcatctccattttgttcagttcagctctgattttgggtattctcttctgctagctttggggttggtttgctcttgtttatttagttcctctagatgtgatgttaggttgagatctatctttttgatgtgggcatttagcactatagttttcccttaacactgctttagctgtgtcccagattctggtatgtttttatctttgttttcattagttgtaaacaatttcttgatttctgccttaatttctctttgtttacccaagtcattcaggagtagattaatttccacttaattatatggttttgagagatcttcttggtatttatttttatggcactgtggtccaagagtgtggttggtatttcagggtttttttgtttttttgagatgagtctcactctgtcaaccagactggagtgcaatggcgtgatctcagctcactgcaacctcctcctcccaggttcaagcaattctcgtgactcaacctccgaagtagctgggattacaggcgcatgccaccatgcacggctaatttttatattttttagaagagatgggtttttgccatgttggccaggctggtctcaaactcttgacctcaagtgatttgcccacctcagccttccaaagtgttgggattacaggtgtgagccactacacctggccggtatttcaggtttcttgaatttgttgagaattgctttctggccaataaagcaattgtggtcgattttaagagtatgtaccatgtgcagctgaaaagaatgtatattctgtttttgttggacagagagtgctgttttttgttttccatttgcttgatagatctttctccatcccttactttgaggctattggtgtccctgcatatgagatgggtctcttgaagacatacagttgggtcttgcttctctgtccaacttgccactctctgcctattaattgaggcatttagctcatttacattcaaggttaatattgatatgtgcagatttgatcctatcatcatgttgttatttggctgttatgtagacttcattgtttacttgctttatagtgtcaatggtctatgtactcgagtatatttttgtgatggccagtattggtctgtacatctcagggtggcttaaagcactaggagaaagcatgcaaaacagcccaaggtgaagctcacttggcagctgagagtgagttcacaccatgtactctaaaatgaggaggtgctcttttcttctcactctaattaaagaagactgagaagcccttcagcacttcactgtgccccctgctgccctgcacctcccggctactttgtggtagattcctggcacttgaactctctacaggcccaggagagaacagctttcttgaggtcctaaggatacctgagaatcattctcagagttaatggaatcttctatattttctgtggattttgattatctactttttttctaacttctgtgagattagagaattgaaagcctgtcatatcactggaactcagttaaaatgtggtgtcttctccaatattgtccaactagaagatgtgggaatcccaactgatataagaactaagaaatatgactacaaactaaagggaaaataagagaagaacttaaagaatatttgggagttttagggaggtcataactgtaatgagctaatgtcatccatatgtccaagggaaagtgaatctgaatttacagggcaacttccgtgggccaggttccttcacacataatttcaagtcatgctaaaatgaatgcatccaaggaaaattttatcatacataacttatgataaggaaacttatgcttaggaagattaattaggaggttaaggtcaccaagcctctagactgtttcgccaggacccaacccaggtctggcttctgtttggttttggagtatgtgttatccccactccatcatgctgcctctccaacctgcagcccagtgcccagggcacaggggtcaggccaagatcagaagggacactaacaccaacaggcctggcgaggtgggaagtacagggaaggggtgactccagcttactcttctctccctcccagagggaccatcagggccattggcactgttgggtgatagaagttgtaaatacggggtaaggtacatggatgacaccatctccatatgtgtatgtgatagagtggcaggccagaagttaatagccacatccagggagccaaggatatagttcccagtaacggcgcttgcgttctgctctcagggctgatgaaagaggatggaagttgtactctgttcctctacttcaatagaaagtaagctaaaaggagaaattgggagacagaggtttacaaaaggaaatttataatggggtcatatcaagataattcaagagggaaaataagacaaggtggctccttccctgaattggtgacacaacactaatcactgtccccacagagtggctgggcctgaccccaactacaggagctcagctgtctctaccctctgagggtagacaggaagcagtggtcatgctactgcagcctaatgacttgagattagaattggccattgccccactgcagggtgtgtgcccagcacactttgacagcttccctctctgttcagtcttgagaaaaaaataacactaaataaggaaggtgaagctacagaaagtcctgactatcaaaaaatgttaacattcagggcgaggaaagactttagaaatcattccaaatttcatgagggtaaatcaattgtaagggccattaaggttggcaagtggcagaatatggatgcaaacctagggcccttcactcctcctccagtgcactttccaccatgccaggaggaagggcgaagagtaaaggtgccaggggaagggctgaggcttgtctccttccacttctttacctcacagaaaatgaaggatacaaatggagccgaaaatttaggcctctggaagctacaggtctgtttcagatggatctattctttttcctgggttcagtgaagttatttggccataaagccctaagccatgtatgatcataacattttaagaaatagaagccaggtattagaaggttccgttttctctataaatagttcaaagtatctcaatgaagtttaggtatccaaaaaaaaaaataccccaactttaggagcattaagtattatgagtaataaaataaatacttatagcaatgggggtttcaggacaatttacctcttgaacataagtagatatgctcaagaaagctatcccaaggacagggttgcatgcacgaagagacgagaccaagttaagttccacagtcaaaacagacatccctatttccttcctagtagcatctgtacagcataaataggtatttgtgaatgaagtcatgaaaagatcctcaaaggtctgtgttagagcaactgtggttaaaatacgagagtaggaaaagtgagattctccagttaagttactaataattcagacttaagactttttagaaagatgatcatcttttatttctttcaggagccatggctatcaacctggagagaggccaaaagacacctaggctttttgtaaaccaaagattgaggtatccacatcagtcagcagtggcttctgcagcagcagccacagaaagtgagtaatggaaacaaaaggatagagatatacaggaagtcctctttcctcacctggagaagaaagaagacagcaaaaaaaattaggtcaaccccacaatcaaggtagagctgctctaaaatctgaggtagccaatgaccaacacaaaccacctcacctttctgagactcggctctcctgtaaaggagaaaccacactgaccctggatcaaaatccccagacagtagacgtgaccttggatttcaagaaggagcaaattacctctgctaatgcagataaagacgccaccatttttggttttcaggatttcacagggaaaatagtcccattatttggcctctattagccagaggcccagatgaccctgtgtccctgagataggacatggctttcccatggcctcttatgagaacctgcccagcaataagtgtttttgttgttgttgttgttgtttgttttttagacagtttcactcttgttgcccaggctggagtgcaatgatgcgatctcagcttactgcaacctccacctcctgggttcaagtgtttctcctgtcttagcctcctgagtagctggaattataggcaaccccaccacgcccagctaattttgtatttttagtagagatggggtttcaccatgttggccaggctggtcttgaactcctgacctcaggtgatctgcccacctttgcctcccaaagtgctgggatttcaggcgtgagccactgtgcccggccacaataagtttttaattaccagagtcagtggttcctgtcattgattgagcttactgactggacaatgagagggtcatatgtggctgtctccagccattacattaaggtgacacttgagcatgacacgaggtctgcattctctacaatcaactggatctgtcccactgcttcccaccaggagcagaagcatgcttgtgccagttcctaaacatcatcatttcattttcagcccacagccctcccctgctcagatttcccaccatctaaggcagcaatcctcaaatgctagtgtgcacaaggatctaaggcacttgccgaaaatgtagattcctgcaccaaccccagagaaccagaagcaatccctctagggtagagcttgagaatttgctttgaaaaaagatcttacatgtttttggataacacttaaagatggtcctagaacagtgcttctggaaattttaatacgtaagcaaattaagagcagcttgttaaaatgcagacgtttaaaaacttggtgcaggcctgaaattctgcactcatatgttctcccagagaagctaaagctgctggtccttttggccacactttgagtcaccagaacccaaaggatttccggcctgtatctgggcccaagagagcaaaagtgtcacaaacacacacagttttaaccttccctgattctctgtggagtagaatcttctcccttacttccagtcagacaggtccccatggataagggggtactgctctgccttgtgtgccctcagtttccctttatggaactctgttctgatctcaagcttccactagacctgctattagaagtgctgaacactgattttctgtgagtataaagtagttaaaagaaaaaagaaatatatgtaaggctgtagagtttccatctgtagatatcaagaaatgagtatgaactgttaggcattccccaagattgttgttcaaagatcctcccaagtttgagacctcaaattctttcaggtgatattcatatcatttactctttttttttttaaacttagaaagtgagttgcagcaaattttctcctgaaagaattgcaaagatgaaccgtggcctctttctatattcataatttttgtcttagggttaaaaagactcccccaaggacagaaaattgtacctaatgatacagcctagagcgcatgttgttccttttgtctacagtaccttctacctctggctcaaatgcactctggtcactgatgcacctccagttctcacagcttagtaaattatggtgtagtgatcacgtctatgtccctacttccccaaccaaattttctgagctatgccagggtgaggatgtggcccttttcatcttgtaattcccaaaagtctgtggtggagtgcagagatgaccactaaatgaaagaatcactcgtactggttgaaacaataccaataaataccttaggttctgtggtgaacacagatcagtaaataaatgttgggcaatcttccagtctctcagtgtcccacggtatatctgttcccccatagggagcacagctagagctcctttacctacgctgcggggacactgatttgcatggggaggcctggtgcaaggcctctgctgggtatgagcagcagtacaagcctttgaaggctgtgtgctgttcagaacttggagctggttgggggcctccgatgccctgtgctgacaagctggcctggggcttctccccactagagtcttctctatatctcaaggtatgcacatctcttcctgggcacacaggcaatgggctagacaagcatctctctcctctaaggcttgtcaccaagcattccttccttccagggggtggggtttggaaattcccacttaatatagcccaccttctgtcatttgacattttctaacactggagtggtggttcccaatctcttcaccatcaaggaggcttaatttcttccctctctattttaatacggttttaactaccaaacaggatcctctaagtgatcatttgttttcttatactgttcatcagagagatgtttaagatcaacatgaagatgacaaagttacatcatttgctattcaatattggaaaatacatctcaccccatattgagatcctagtctgggctagctgagttacgggggctgctaaaactctagtaatagcaacagctgtctgccttccattctcctgctatggcacacacttctttccttcagaatcacacccccgagatatatgattcataaccttatggctagaaaaaagaggacatgatcattctacaggtcccttgctcccttgaattacctctcctgggcccattaagaacaggcacatgaagaaagaaacccagggttgtgccacaatcgcacaaaaatctgtccacagataacacctcaaggaggtagggcctgcccacctgaatcactgttgtctacataatgcaacttaaccatcctgttctgcgtttagctattcaagacttttgtaaccagtccctgtggtatgggttgttttcccaattgtaccctgactgaatcactgggtatcatgtcagaggagggggacctatttaacctcttttccctggtgtcctggagcccaggggctcctacgtggcaatgggtgccagatacccttcctcagctaggatataggggtccagatttccataatatctatagattgatttacttaaaacttatttgttgtcaaaatacaaataccctgggcttaggaagaaattaatacttatcaagactatgtcaaataaaaacaactaccactaactgaaaccacttagttatcagatatattatacatatcactccatgtaatcctcccaacaaaatgatgtcatctaagagatgagaaactgggacccagaccagtgaagccccatggcataagtcacacaggcaagaaatggtaaagcaaaaattcacacctacgtcttcctgggctttgccataacgcacactggcttcttcactgtggctattgcctgacagaatgagactcaagtaattacaaggattcatcagaagggaaaagctgacatgaccagaactagaacacagcccagggaatgcaagtctgggtagatcatggtactcgaagcccaaggatcatttgaaagaggtttaaaaaaataaaaaaaggagtaaaatgcacaagtgaaatggaggtgaaacttaactatagcttaatttttacttcaaagactgctcagctcattttgggaatgtgaggggaattaagaagattctggataggtttgtaggagaggcaaggtgtgtagggtatatgtggggacaaagggagcaattgtatcctagactgtatccaataattttctgggacaaaagagagcaaatgtagacgtggggaagtagtagcttgagtggtatcaggtgccagaaagaagaccaagggaaaaacctctgatgaccatggggatagtgtaaattgagtagcaagaggaaggaggactgcagaagttcaagaatgatgagaactgaggaaacgaagataaacacagagataaacacagacaacttcactgcagcgaaagagaagatggtgttacacaggtaagcaggatcaagaaatggcttttttgttgttgctgttgtttgtttttttttttttttttgattcggagtctcgctctgtagccaggctggagtgcagtggcgtgatctcggttcactgcaacccccgactccctggttcaagtctcctgcctcagcctcccgagtagctgggattacatgcacgcgccaccatgcctggctaatttttgtatttttagtagagatggggttttgccaccttggctaggatggtctcgatctcctgacctcgtgatctgcccgcctcagcctcccaaagtgctgggattacaggcatgagctaccgcacctggcctggctttttttttttttttttaatggagtgtagctctattgctcaggctggagtacagcgatgcgatctcggctcactgcagtctctgcctcccaggttcaagcaattctcctgcctcagcctcctgagtagctgggactacaggcatacaccaccgcaccagctaatttttgtatatttagtagagatgggggtttcgccatgttggccaggatggtatcgaactcctgacctcaggtgatccacccgccttggcttcccaaagtgctgggattacagacataagccatcgtgccaggccaagaaatggcttttaaaaatgctgatttgaaagcaaaagagaaggaagtagaggagagatttatgattttaagaaaaaggaggaatatgaaggatcaactttgctcttttcaccagccaaagggcatattctagaaagatggttttaaaccttctcttcctgcatttgtaagtgtgcaaagatgccatgcctttatttctctagaactggtttttcttcctcacaagtctctcatccataaccttagtccagcccaatggacaaaaccatgaggaacctcaaacacccttccaaaaagatttagattttactcaagaggtgaaggagaatcattaaagatgactgagtaggggaatactatagtcagagttttttgttagaaatatcactgaggccatacaggggaaagactgggagtgtggcaagagagtgagaccaaatgctcagataaaggtagggaggcaattgttatagtccagaactgaaataggacagtggaagtggaaatggagggaggggacaacaaagacatgtttagagatatcagaaattgaccattaaaataggcatacaggaagggaaaatgtatctcattaattaagaaagcaatggcatactggataccaacagcaaatagcaaagaaatggttgtgtgggtgtgtgtgtttttttttaagggaaaaaaatgaggataaagggaagagaaagtgatgttactaaccctccatgtaatgataatctccaaatagctcttcccagcagttccatacttaagggtcaggatctccattcagggatctttctgtggtgctctaaaggggcagactgaggactttaagggctatcactttcaggtggctttctaagcagcagaattcgtgggatgaggaggacatgcttgttctttacagattcactgaagtgaatctgggggctgatcgatgataacactgtgttgatcccagagatgacaaaggggctgagtgtgagataatggagttcctgaaacccctacgatgaatatgtccacccttccttttcatcagctgctagtccctatctcatccttctcctgtcccaaccccattattcctaaatctgagctcaggcttgccagcacctctaggagtaaattacaagactgagaccagagcaacaagaaaagcagagacaaatgactcaacaagacagccacaggaggcagggcaaggtggctcacgcttgtaatcccagcactttggaaggccgaggcaggcagatcacgaggtcgagattgagaccatcctggccaacgtggtgaaaccctgtctctactaaaaatacaaaaattagctgggcatggtggcatgtgcctgtagtcccagctactgggaggctgaggcagaagaatcacttgaacctatgatgcggaggttgcagtgagccgagatcatgccactgcactccagcctggcgatagagcaagacaatgtcaaaaaaaaaaaaaaaaaaaaaaaaaaaaagacagccaaaggaaagggactagaagagagaggaatgcaaaagaatagaaaatctgggccaggtgtagtggctcatgcctgtaatcctagcactttggaaggccgaggcaggcagattgcctgaactcaggagttcgagaccagcccaggcaacatggcaaaaccccatacaaatacaaatacaaaacgttagctgggcatgttggtgcatgcctatagtcctagctacttgggaggctgaggcattagaattacttgaacgcgggaggcggcagagattgcagtgagctgagaattcaccactgcaccactgcattcgagtctgggcaacagaacaaggctctgtctcaaaaaaaaaaaaaaaaaaaaaaaagaacagaaaatcaaactctaacaccatcacctgggtagttccctccattctcctatgacttccaataagtcattagcagatcacctatcatctctttaatttcttcaaaaacaaataaaatctcaaacttgcatttgggaaactgagaaactttcaggaaacacagaaacacatcttcaggaccttggacagcagaaaaaggaccatcccgcacacaccccgaccccaccccggcctccccacaacacatgacacccacgccagcaagactgctgaggaaatgtgacacctcaacatgctgatgagggaaaggataaataaagggctatatagtcatcaatggagagtgttcagggaaggtatgaagactcaggctacaatagtcaagaggagccctgggccctacagaatgcctagtccaacttcctaatactctgagccagagaaggacattctctacacctacattacaacttccctcttcagacattgatttttaaaagaatatatagaatagaatattgatattgagactttttccaattccttggggaaaaatgcataaaaatataacttgcagttcacggatctagaaatagccttacaaatgataaagaaaatttcacaaaggtaaaatatctcatcaaggtagagtaacacaagagctgttgacccagtattagtccttggacatcctgacttctgtgcagtgtttttctctttgtagttggtaagtggctaaagatctggattcttcttctagctctgccatacaccagatgtgtgacctttggcaaattactcaatcatgctgagccttgggttccttctttgaactgagcccccacccccaccccacacgtcaggcactattagggaatgaaaaacaaaaccaatctccatgctaaagtagctctccagtgtagcacagttcagatatgaaaatatcaataatccaacaatactagttaaacatataaaagtagtacagagaaaaacattaataacctgacatttagagcaagattaggagggcttcacaatataagcaaagggaaatccaggaagaagaaacagtaaaagcatcaagcggtgcaacaagacattagatttaggaaaccatcaataatttagttttgatggatggcaatggtggtggggagagacatggggtaatgaaacctatcatatactgatgttgtggaagtccaatgagtcactatagataatcattagctactattatgccaacagctatccctatgagaaaaaaattccttaatttaacatttatagaaaacctctgtttgctccctatactaggggcagctccttttggtcccttcctaaagaaatagagccagtttgagaaacaggaaaatcaagttccatactttcctagcctatgaaataccagtcaagaggtaaaagtgcttcctctgtcaatatcctgattcttccactgaaatgtcacttagcagagcacatcttttacttgtgcgatttgaaaacaaggctttgcctaaagaccagggtatgcaagggatcacctctgggacgatctcatggcactgagcactcaagcaaggtggtaacataagagtcagacttgataaaagtccatttcccaggaccacttgacaataagggcacagaaaagtgctctgaggaataatcttcatgctattaccattttcaacctcttgtacttaatactaattttcttagcttcctataattagatatgtacatatgagctagtagcagccacagtcctacaatctgactagttcatgcccaactgcatgcctgcatcagggacatctggctattgtagtgtcatggaaactctcctctctggtgaagagtatctagagacacccatgagttttattatctataccctgtactggtttgaacagtgtcccccaaactcatgtccacccagaacctcagaatgtaatcttatttggaaatagggtctttgaaaatataatcaagttaagatgaggtcatactgaattaagggtggacccttaattcaatgactagtttccttgtaagagggacacttggatgcaaagagacccacccatagagaatgtgatgtgatgatggagggagagattgtagtgacaagcctacaagccaaagaatgccaaagattgccggcaaatgccaaaagctaggagagaggcatgaaatagatgctcccttagaccctccaggaggaaccaacctggctgacacttggatttcagacttctggcctccagaattttgaccaaatcaatttctgttgttttaaaccacccagtttttggtagcttgttaaagcagccctaggaaataaatgcataccaccaccactccatctattttccttctatgtgcccaacatttatcttctcagaggatgattataaaccctagttattgtatcaacacacgggaagggacactgagcagaacagcaggagaatgaacaattagtatcagattagcaacttcacaggtaaggtaaagggcatgggaatttacttctcaaggctctataatatgagactctttaaaaaccctgtggtgtttttatatacatctacaagttctgtgatatgcttcctttgaaaaaggcagagcctaattcccctccctttgagtgtggtcagtgctcgatgacttgcttttaacaaacagaagtgacagatgtgacttctgaaattaggccattaaaaacaatgtagctttctccctgctctcgctctcaaatcacttgctctgggggatgctagcagccatgccatgaagacactctaaaaggagacttatgtgacaggaaacacaccttctgcctcaggcacacccagcacaccctgccaggcacatgagtgagctaccttggaagaggatcctccagccctgctcacactttcagaactgcagccccagctgatatcgactggaaccacattagactctgagccagagccactcagctatgccatttccagattcctaaccacgcaaactgtgagacaatacaagtttattgttttcaaccattaatctttggagaaaaacagggcaatagataattaacataagaacctttaacatagtcttcaagtcctagtaagtactcttcctgcctacaagacacccgctatgtgatttcttcctgcctctaacatacctctgaaacaagtgcaattccaaatcccttaacccaagctagagcatagaattcacaggaccgctgcctttgtcctcctccagctcagagactgatgtctatatcatgaatgcgctaagaaagggagaatcacgagtggaatccagtatcagtagctgggagcaaaagacacttgcggtaagggtcctcgggtttttcactgcaagacttttacctgtcaaaaaaattaaaatggaaaagaaaatttaatcatttgaaacaaacattcattgagtaccttcaatggcaagcatagtaccagacagcaggcataaaaatggtccctgcttagaaattcacaggaatgacaaataggttttgtaacagaagctactgctgtaccatttatattcccttagaccaagatctggctacagaatttgtgaatccctgtgcaaaacaaaaacgtggggtcccttgttcaagaatttcaagaggacagcagcagaccagtaaaccaactccataggtatatgtccatgaagctagccctgcctcaggcattcacctctgtgtgaaggctactaactgctctttcagtaagcttttttctggctgatttggatgcttaatttgcaccaagggaaagcttaatatccctgaaagcagcactcaaccaacggcaaaatggcagttggtagataaatgctccagcttcttccccccttgggtggtataactgagaactattctagtgttgagttttccagtgggattgagatgcaagtgtccacagtgtaattgggagattccttaagattacctctaaaataaactacttatactcacattcttatctcacagtctgcttcttggtaaacccaaaccatgacatctttcatctttcaagccaactctaacttggaatacagtaaaatgaaaaaaatctaaagctgcatctcattcaacaggaatgaatgtaatatagtaacgctggccctcaccatggcaaggaaagtggtggctctttaaatctgaatggtgaaagaccttgtgtttggactttgagacaaaaagctgttaatgaaggctgttaagcagcagttacagggtcttattttagagctacttctttccgtaatgtacaagtggatcaaagtgtggcaaggctgaaggtaggaaaaccaattaggaaatgagaaactcgcaactggtaaataggacaggatatctacctggatgactacccacatcattgaccaaaatggagaaagcacactaagttgtcaagaataaatcaatctgtgtcacataagtggccacaagtactgggatcacctacccattgagcccctgaatttaactagcaaggagtgggaaatgaagaaggccaaggggccgatgatgagcactgggaactgatggctctttttgatactaagaccaaattaggaacacgaagcactaacaatgctgccgcatccaccactgattttcaccacggagtgcttagcaaaatcaaaacaagaacttgtatcctaaagatgatatcacatgggcctactgaacactaatcttacgactttttaggaatttagagatgatcactccatgagacactgaaatggtgtctagcttggcaaggtagaagtctgtttctctgacatgtgatggccttgttgtaggtagtcttggactaaaatgctgtcagcaacatagacttcctcagtgttcctgctctggaactcccaaggcagtggttcccaaagtctgctgcacactggaatcacttgatttttttaaacaatgatgtctggcttccaccctgagacattctcatttgattggtacacatggtgtgacctgggaaccgggatttttaaaagttccccagctaattctaatgtgcagcaaagtttggaggtgactaccctaaggaactgggcccaccacagggtctgacagggcttaccgccatacctgtactgcactccaaacagtgggacaaagcaaggggcatgaaccagaagctgcacacaccatctctgctcacccttactggccagtcacatggccatacctggttgcataagatgctgaaaaatgtaacttgtattcagccagccatgtgcccagctaaaattttttattcaggaagaagaggaagacaggtactggaagataaccagcaatctctcccacccccacgcttgtctttttcaaacagaagcagcccaatctggcaaaagtaccgatccttagatctggagacaaaactcaacaacgggcttctctgacttttgtcagacatcttgcacatcacatgtagatagagccagagactgtaacgcatcattgtcagcgggaagaagatacaagcttggagatatgcatcagaatgactacccatgcaaattcttgaattttcacctgagggaggtgttggaggaataaattgttctacgggacaaaatcaggtgcaatatcaaaattccatgtacccactctagttgactgaatacagtgaagcatttccagtacaacaatataggaaaacttcaaataaaggggtattctctaaattccactaaatacatcatctttggcctgaaactatcttgttaagctacttgttgagactcttcactctagatatgcttggtgctgcctttgcattcaagtcctgttttccagacgaaatacagacataatccaattgtaatttcatcaccatgcatcttggatgctgcagttagcctaaatgaaataaaatatactaatcatgagtgacagtgatttttttaatcgtaaaacgtattatcaagctatttataagtaaatttcacattacaaataaggcattaactaaaccactgctttacagaaaatcacttaatgacactctagtattatatactgtttacagattaaaaacttaagtttaaaaaggtaatttgtttgaagtcacatagctagtaaactactagttataacttaattaagagtacattgaattaagttataactagtaaaggactaaacttctagacttgaacttctgatggtctgacttcaaaaatatcttatttttaaaatcatagcacggagcaccttgtatatcatgatatagctatattactttgcagggtttttatgtctaagttattttctcctcctgttccacttccaccctcccattcactctcttctctcctagtagacaaagtccttacctgtctgccagtccccaaccccatgcatgcaattacctcatggaaggacggaaggggggcagggaagaggggacctcctagcccaccaccttccaacacacctctgcagagcccaggccctttcaggcaccccagtcacagccacaccaagcttctagctactgctcagcacacacttaccacctggtttccctgtgcttctcatttgtaattttggattttagtctagttcagacattccttcaattcacattaagcatccatttcctctctgatattcttgtctctggtcccttttttgtcttatccatttggacatctattcctaagcaaaacattctaaattctattttcattatcttactccttagcccagatcaccagaagctccctactatcaacacaaattggaaaatctctggtgtgattatgaggagaccattcagtattttctttgacactattaaacaacattgagtttgcctaatgtcagtactaaaggccaggttgtaaaatagtaaaacctgcagtggtctctaaggcaactagctgtttattatagtagttggggaaaggaagatataaaaaatcttctaaggaactttattatagatctgtttacttaggtaaagcatatacaggaagatgcgggaatcataataaatgcttatgaagcaaaactaaatgcacctgtactgctacatccagattcacatacaaacgacaaagagcttatatccagactgcatgtgtctgtttttgcactgctataaagaaatacctgagactgggtagttcagtttataaagaaaagaggtttaattggctcacggttctgcagcccgtacaggaagcacagtggcttctgcttctgaggaggcctcaggaaatttacaatcatggccgaaggtgaacagaaagcaggcacatcttaaatgacaggagtaggagcaagagagagagtggggaggtgctatacatttaaacaaccagatctcacaagaactcactaccataagaacagcatccagggggaaatccacccccaggactcaatcacctcccaccaggccccacttccaacattggggattttcattcgacatgagatttgggaagggacacaaatccatatcacagactgtataaagaacccctccagtccaggcgtagtggctcatgcctgtaatcccagggctctgggaggccaaggtgggaagagtgcttgaggccaggagtttgagaccggcctgggcaacacagtaagactctgtctctacaacagaaaaaaaaaaaaaaaaaaaaggaattcctccaggtacgggggatgctgaatatagagtcaagggtgattattccccagctttgagatttaatgtctgccctcttaggctttggacttgcttggggcttattaaccctttcttttggcctacttttcccttttcaaatgggaatgtctatcctatgcccgtcctgccgttgtaccttagaagtagataacttgttttgatttcacagatggaattttggacttctgagttgatgctgaaacaagttaggaccttggggatatggggattaagtatagttgtatgtgagaagaacatgggtttgggggaccacaggcagaatgcaatggtttgaatgtttgtcccctccaaaactcatgttgaaacttaaccttcaatgtggcagtattgacaggtggggcctttaagagatgttcatggattaatgggttatcatgggagttagactagtggctttataagaggaaaagaggcttcagctagcatgctctgctcctttgccatgtgatgccccataccacctcaggattctgcagagttcccatgagtaaggaggctctgaccagatgcatccccttgaccttggacttcccagcctctggaactgtcagaaatgaatgttattttttttctaaaaaataaacaaaaaactccttcataagaaaaagattgatgactcaatggaaaaatgtgagcagaacagatgtttcagaatagagaataccaaatggcctataaacataggacaatatatactatctgatttgtaatcatggaaaatactcagtaaaaatggccaaaattcaaaagtctgaaaataccaagtactgagagaatgtgaagcaatagggactctgcactgcttggtggagctgctgtgagctgatactagggagaatgaatggatctgggaacagagattaacatgtaaatagttctctttgacactgaaagggtctgttcaggtgcgagtacactctgggtctaacaagggagggcaagaaaaaacaacagttctctttggtgggtgtagatcttaggcagataaagaaacttcaacttatttgagagaggaggtaggggatggggaggtcacagagaactctgggtttcttcagtttactatgccacagcaccatattttcgggtatgagttctgagccccacaatggccataagcacttaaccacagacctagtgacgtatgtataaaatatacactagattccaaagacttagtatacaaaagaacataaaatatcttatttgtaattgtttaaaactgattacatgttaaaatgataatattttaaatataatgggttaggttggtaaaataaaatatattattaaagttaattttaactgtttctctttaccttttttaatgcagctataattagaaaaccacaaatcatataagcggcttgcattatatttccttttttgagacagagtcttgatgtcacccagtttggagtacagtcgcgcgatctgggcttactgcaacctctgcctcccgggttcaagcgattctcctgcctcagcctcccaagtagctggaatgaattacaggcatgagccaccaggcctggctaatttttttgtatttttagtagagatgaggttttgccatgttggctaggctggtctcaaacccctgacctcaagtgattaacctgccttggcctcccaaagtactggcattacagacgtgagccaccgcacctggctcgcttccattatatttctattggacagcactgctctggagaaaaattaagattctccttttacaggatatttttaaaaaatatttaaatgtaaggaataaaaaatattgtaagaaaccgaagaaagcaaattagaatctggaggtcaggatggatttcttaatgaggacaggtaggggtgtgtgtgtgtgtgtgcgtttgcatgcatggacacacggatagggcaagcacacatacatgtgtgcatatgtatgagactgataaacaatccaataggaaaaatgggcaaaggatagaattgaaaatgcacagaaaatctgaatggcaaacagtaacataatcaaaattactaaaggaagagaaaattaaaagtaactaagacttctctttattggctgggaaaaaaataaaaacataaataatatgtatctttgctgggcaagtgggaagggagcaggatcatacattgttgtaaggaaatgtaaaggttaacagcctactgagaaagcaatatggcaacatccatcaaattagaaacatgccatatccttcgacccagaaacctttctcacaaaaatctaccagcacatgacatgtgttcagaaagttattattgtaatactgtgtagcagaaaaaaagaggaaactaagtatcaataggaaatgaagtaaatgcctatctactgacaaaaggttaaaaacattacctgcaaaacaagacctgttatggaattattaaggattataaataaaaatatcagcaaatttttaaaaatatgaaaatatcaggaatggcaccactgtaggaaaacagactacagtagttccctcttattcttgggagatatgttccaagatccccggtggatgtctgaaaccactgatagtactgaacccgattgctgttaataggaagttttttttggtgatgtttcccacccacaattttaatgacttttctatcttaaccaagtgcttaacatgcactgtggctgcaacttttccattttgaagtgtgacagtaaaactagcaaaaatttctttttcctcctttataatttcagggatagaagatttgttctgaccatggatcttagcaaactcagcatttaaaaaatttccttaagtcaagaacttttaccttttcacttaaaagaagcactttatggcttctcttttgtatatccaagttgccatcattagtactcctgcactttggggccactgtcatgtaaaataagggttccatgaatataagcactgtgatacttaggcagtaaaattgataagaaggctattaagtgactaataggcaggctgcatatacactgtggatactgggcaaagggatgatgcaaatcctggggagggatggagtggtatggcatgagatttcatcatgttcatcagaatggtgcagcgcccaatttaaaacaggaattgtttaggtgccaatttaaaacttaggaattatttctgatattttccacttaaaatattcagactgtggttgccaagagtaatgaaaccttgagaaatgaaaccgaggataaggggaggactactgtatttcatgatatgctggtgtggataaaaataggtgcaaccttactgaagttgaccatgaggttgatcacctgttgaccactgaataggccccacagacaaaagctcctgatctgaggaatttcgaagggaacaaagaccacctggtgaccaccaaacgggccagacagaggcgaaactccttttctgggaattcagaagtaattaaactttcctagtatctaaagtctggttccaggcctctttcaacttttacaagtaactaaaatttatatacatctctgaaatgccatgccgaaactctttttactatcctaagctcctgccttaaggtccataaatacctctaaagaaaaatccatggcagcacacttagtcctcttgctgaggcgccccactgcactcttctgcagtgttctgttaccgcctaaggggttcaccttgcccatgcctagacagagtcaattcatcgagacaggggaattgtgatagagaaagagtacttcacgcagaaccagctgtgtgggagatcagtctccccgagcacgggggagcagagttttaaaagataacttcgtgggtggggggaagccagtgagccagaagtgctgattggtcagggatgaaactgtagggaatcaaaaccgtcttcctgcactgagtcagttcctgggtgggggccacataatcagatgagccactttgggcagccaaagtgagtggatcaccggaggtcgggaattggaaaccagcctggccaacattgtgaaaccctgtctctactaaaaaacaaaaaaaaaaaaacaaacagaaaaagccaggcgtgatggcaggtgcctgtaatcccagctactcgagaggctgagacaggagaatcacttgaatccgggaggcggaggttgcagtgagccgagatcgtgccatttgcactccagcctgggcgacaagagcaagactccgtctccaaaaaaaaaaaaaaaaaaaaaaaagagccagtttattgatgtgggtagtgccagctgacccatcaagtacggggtctgcaaaatacctcaagcactgatcacaggagcagtttagggagggtcagaatcttgcagcctccagctgcatgactactaaaccaaaaattctaatcctgtggctaatgttagtctagtcctcagacaagaaggaagtctgctttgggaaagggctgttaccctctttgtttataaactaagtttctcccaaagttagttcagcctacgcccaggaatgaacaagaacagcttggagcttagaagcaagatggagtcggttacgttagatttctttcactgtctcagtcatcattttgcaaaggctgtttcagttcttcctttctaataaactttccttttttcaaacctatactgtttgtaggtatggtaaattcattttaccaacctgcgagttgaccacttcccggtgccagggctctgacaccttgccaggcacttacggaaagataattgtaaaaatctaatagaattttaaatttccatgccttcgaacccagcagccaaacttccagaaatttatcctactaatataatggcacgacgatctaaagagatatgtacaaggatgttctcgacagcctttatttaataagatgtggaaagaaccttaaatgtctactcaaaattgttgaataaatcacatgtctacaaaatgaataatgcagactttaaaaagagtgaggtagctctatgtcaccaaactggaacaataaaagccactataaagtataaaaagcaagctgaagactgtctctatgtttgaaatttttcataataaaaaatgaaaaaaatggagggggattagatatattgccttttcatgagtaagaatctcacaagtcttggacaattaaaccccgccttcatccctcccatctcatcatatctgacctcaaccagtttcctacctacactgcttatatgcccatttgctctatatgactcagtcatttcaagattgcttctgttttcccttattgatataaaaatattaaaaatgtatatttaaaatttgtttaattacatcccattattacagttcatttttgcatattcctgtgttgaaaatcctttggtataaatcaacatcaaaactcggtgttattccacttttcttgaactgtaatcctttttaaacaaggaatataccttttcttgtttagagaatatacgtacattcataaatcttggcaactttcaaaggccataacaaatttgtgttaagaattcagatcccctttattattgtggtaaacagacagatgaaattaagagattatagcttgttttcactctctcccaattactatcgcttgaaaaataccggatatttcattattatcctgtccggagtcggcaaactacggtctactatctgtcttcgtatacgtcaaaagctaagaatggtttttacatttttaaatgactggggagggagggccagaatccaaggggagtatttaatgacacttgaaaatgttattaaattcaaattttagcatccataataaagtttcattggaacacagccatgctcatttagcttttgtttgtttttggagacagagtctcgctctgtcgcccaggctggagtgcagtggcgagatctcggctcactgcaacctctgcctcctgctttcaagccattctcctgcctccgccttccaggtagctgggattacaggtgcgcgccacacgcgccacacgcccggctaatttttgtctctactaaaaagtagagacagggtttcgctatgttggccaggctggtctcaaactcctgacctcaggtgatccacccgcctcggcctcccaaagtgataggattacaggcgtgagccaccgcgcccagccttcatttagtactgtctaatgatgttttcatactgcaaggagaaagctgagtatggaccacaaggccaaaaagatgtcctctctggctctctacagcaaagatttgccaagccctgttatatgtcatactacttgcgcttcataattttatagttttacctagacagtctcccttttttccttccatattcagcataaaatccccttaatatcagtctctaggcaagcacattcttcacagtccttagaactggacctcctcttgttaatttccttagtctaatcacattcctcctggttatctacaaacagaaagccagaaaggagggctatcaacatcttaagcgccacaaattaacaaatcaaaaccaaatctctctctccctccgaagccacggctaaggaggctcactgcccagttagtggctttcaaactacccttacaagtgagacatcttgtgaattagaacaagtgctgctgctaaaatccctaacggctacatagcaatgtgaaaaaaggtatcaaatgtaattttctcaaatttaatcttcttcaattcttggcacaaaaaaaggaacagtaaaggtagacaactgtaattagcatgtgtgatcccaaatctttataccttagatactggattatattttcagcaagtaaatagtttctggctcccaagatgagaggttaaataatgcagggtgtttgtaaacagcagtacaatttacaccggaaattagggccctttctcaccgaggagagtacagcaaaatctgctcatctctttcaatgaatattctccatgactagtgctggcggcggggaggcggacaagctatcttttctaccagccgtgtcacacccctcctagcactaacccctcctcctcagccttttcacacctctacccactactagcccctccccagccccatcacctcttcccgggcccctcacacctctcccagcatactcttccccagcctcatcacctcacccacttcctccaaaatcactgacctgctaagcttccagcagcaggcgggcaaagcagggaggctgtaatgcaaaagtccgcagtccctacacaaacactatctgctcctgcggagaaactcaagtcacagccccagaagtggaaagaacaggccttggctctcacccagttaacaagcgtttatccagcgcacgtgttgcggtcggaccccatgcgaaggagctaaggacacaaaggtgagcagcagagacgcggttccagctctcccccggctcccactccagcgggataggtagataatttcggtaaatttcgccaagcaggggcaggacaaagagtatttgaagtctaccgcggggagaacttacctaatccttgaatgttaaaaggctaaaaactccactagtcggaagtgacgtgccagcttagccccgcaggtccgccacgtaattggccgccgccacagctagccaccctctccccagactggcccgaagagaggaaaagtgtggaagtccacaagccgcccccgccccgccctcttcgtcgactttcagctgcaccgggaggcggcggcgcctggccagagccggggcctggagcctggactagacagcctcgccggccggggcgccagtccagcgccctgcgggcaatgggcttcagcgctcgagcacgcgcatgcgcgggcctgtatctccagaggattcctcgggtcacctggacgccagcatctcagccacctgcccctctgggtcccttcttgcccttgattccccctgctgcttctcatcgccagccctcctcctccttcttccgcaggcaccactagacccggccgcggccgcccgccgacaccccagcttccactgacacgagcctcggcgcggcttccgcttccggcgagtattgtgtgtcgcgccgcggggcgggggcgaggggaggaggaaggagggaggcagcgctccggcggctccgcgccccgcactcccggacccgaagccgggaaggtaggtgctgtcccgccgccgcgcccgagcctggggcctgcgctcgccggccggctccgcaagccgcgtcccagcgccccgcgactgcgtcaccggccccccgcacgtaaccacagctgcctccgcccgcctcgggcccgggcggacgttttgccgccccggcgacgtcagcgcgtccggcgttgcttggctaccccgccgttcccccgtcccgctgctgctcacctccccgggtgaaactctgacgcagtcaccgcgggtctcggcagcgtcatagcggcgggcatcccatctgcacgtcacacctctttctcacctggacacgcatcccttcctaccctgccagccacgacgtttcctctttcccctctccaatgcccagccccagatctggcggaagaagatggagaacgggggtgggacagagttgtggacaacctctcaggagagggtcgcaaggtgggaccctgaacagtggtagaaacaaaatgagattgtccctgaagtttgcccttcagctgagacacaaggagtagaggaagaggaaggactaacgcagaggcactcaaggtctcactatgactgtagttgagagtcctctcccttcttccctaaccctttccccatttctctcaccacttctttgccagtctagatccgtcctggtgccttactgtgcatacagttctactcgtctcaggtgaggaggccacttaatttgtaaaagactgaggaaggggtaggatcaccacaagtcaaagttggattcccacagatagaaatcatctgactgaacttctctcctattgctgacagaagaaattcaaatccaaagaagttatcagttcctactccaaatcaaacacatttgtgtgtgccaacaatatatacaggaacaattgttgttaacctacctcattacatggccacttatctctcagcacatagatctaccaaatttccttccttccagtaggtccctggagaaggatgggggtcgggaggagaaaaggttatggggatagttaaatcaacttacccatggctaaaagtatggatgttttaaggatggagtagggggccagccttgtgttttataaatctctcctatgcatttccaattcttctgaggctgcgcttgagggagatctcattgcctcttttgtgtctcttaattcgcaaccactccaggacctataagttggagacacactatgcccagggtgttagttatcaatagctatattgaaagattccagtcactacaaatagactcgttgctctcttttcaagaagttgttggcctgagctcagcaatatttaatatggttgccataatttatcagttttcagcagttctgagtgtccagatgaacacaagagaaatggaatgttgcgtgaaatgtcattccaagaagagagcagatttcctttaggctagtctgatggataaaaggaagaataatttcagattttcctgaaaagaggaggttgcctttgcctcattcattccatttgttagcctttagagcagtggtatctaaccctttcaatatgaggactctctttgcttatctgtggtggctgataaaaattatgcatggaccttctgtggtggtgatagaacaaaagttatgcatggacttttttttttttaagcttatcagctgtcattagtgtcaatgtattttatgtctggcccaagacacttcttccagtgggcccagggaagccaaaaggttggatattgtgatttagaagaatgagagaacagtgtcagagaatcaagcttagactccagtggattaatcataaagctcttataacattaaactttaaaatatggttaatttaagaaatgttaatatttttatgacattttttacttctcagattcctttcttgtctgttagaaacgtatgtcaaacgaggatacagtgtctggaactattggttctaagatataagtggaatgagcctggatcaggagaagtatgctgagctagagttgaaggaagcttctctttctaacaagagaaagcagaggtaagagacaagatagatcaattgggggttgtgtgtcagtttactaacaagaaaaaaaaggttgatggctgggagtcacaagttttgaaaatggagaaacaaagaggttgaattgattggaagagaagatggagaataacaagaaggggcaaatctggagttaggacttaacatagggataaatgtcgggtcagggatgcaaaaaaaaaaaaaagaaaaaacctccaattaatatttttattttctctgtcctcttccccactcccaagttaaattatggcagagacaagtctgttagaggctggggcctctgcagcctctacagctgcggctttggagaacttacaggtggaggcgagctgctctgtgtgcctggagtatctgaaggaacctgtcatcattgagtgtgggcacaacttctgcaaagcttgcatcacccgctggtgggaggacctagagagggacttcccttgtcctgtctgtcgaaagacatcccgctaccgcagtctccgacctaatcggcaactaggcagtatggtggaaattgccaagcagctccaggccgtcaagcggaagatccgggatgagagcctctgcccccaacaccatgaggccctcagccttttctgttatgaggaccaggaggctgtatgcttgatatgtgcaatttcccacacccaccgggctcacaccgttgtgccactggacgatgctacacaggagtacaaggtggggaagcagacacacgatgtcagtgtgggtaaaaagggagaagcggcagaggatgagatactccctaggtagagatcgtaagctcctactactcactttgtattctcagagctgcatatgcaggggcacacagtatgtgtgatcagttgtcctctagcctgaaaaagagcaatggtgagaagtgccctaaaatttctctctgacttttgcaatacatgtgagtcttatgggtgaatattggtatgtgtggtcatatttttcataaatgaatgaaaccacatggaaaagattaaacttaggaagaactgaaaagtagtctggtttcttcattctgcctgcctgctcagaatgctccttgttttcacactggttattgggcataggtaatatcgcttgagactgatacctaccggactaagctgaaccattcaattgtttgcagcttctctaggtaatgggtaacatggcatatcatttaacttactgctgagacaaaggaaaatgtttgaataaagggaacagagatatgaatgtgttagcattttatcatatactttgcttagttatgttactcttgaaaacaagatttcaggtaacttacagtataataaccatgtttttattgtaggtggacagaggtggatgggaggacaggtttaaagagagatattagggtacagaaggttgcttggatggtaataggcagttgcctcagtaagaaaatggaaagagttgagaaaggacacagagttgatgacagctatctcagattcagtaaaaggacagttgggtgagcagagaaggtgatgtggacaggctagtggcaggaggagggactgtagaaagttgacatcccaaatgacaggcaaggaaggaagtcagatcaagaggcagtaagatggctaggaagcaaataaatggtttaaaacaaatggtttaatctctgaatggtaggtataccagtcaaccccaaatgtcacctctcccacttcctccctacccctcaggaaaaactgcagaagtgtctggagcccctggaacagaagctgcaggagatcactcgctgcaagtcctctgaggagaagaagcctggtgagctcaaggtaaaggcaggcaatcccatgtaggctgctctgaagggtatttgcctatgagggaattaactgtacactatttaatccaccagttccggttcattagaaaaatgcagttctcgccggacatggtggctcacacctgtaatcccagcaattctggaggccaaggtgggcagattgcttgagctcaggagtttgagaccaccctgggcaacatggtgaaaccctgtctttactaaaaacaaaaaattagccgggcatggtggcacatgcctgtagtcccagcgacttgggcggctgaggcaggagaattgcttgaacctgggaggcggaggttgcagtgagccaagatcacaccattgtactccagcctgggcaacagagcaaggctctgtctcaaacaaacaaaaaaaacaaaaaaaaaaaaaagaaagaacaatgtagttctctcaaaaatgatggcattttattaggcttgattgtcattaaacattgtacttaaattacttgtcatgaattaagtattaagagggatttaagagatgaagaacagacagaatatcttacatctggtgagctgagagagttcgtgcctcttggtctcctttttttgttaaagcagcaaaggaggctttctgctgagaaggcagggatgggagtttcttagaggacttgaagagaggagaatatggaagattcactggggagaaagggaaaaggagctgaccaagagtctcagaagaactatctaatgacattaggaccacattcttaaaactcaagtaagcttacatatgctagaatgttctccccctccccatcctccaccataggatcttattcatctctcaggcgggatgaaagccacttcctatgcagcctttcctgacccttcagaaattaacattcttaattttcatacaattttgcacctcttttatagcattgccttatttgtagcatggtattttggtgtctgtctgtcttccattgaacagtgaacaattatcatttgtagcaaaaataactagaattgagtcctatgcattaattcattaggtatccgtaacattccagatttatagggttgttagggtcttagagttcaggccaaattgggataagtgagacatagaaaagctacgagaaagagacagaaggaaatcctgaggccatctttagtaagatgtaggggtaaacctagatattctttaaggtaggtattattaccttcagcttacacagaaggaaatggaccttgggtaagtgactagtccaagatcataaagccagtaagtggcaaaaccaggaatactagttcttcgtgaatcagtaaatatttgttaagctcctggtttaggccaaacccggtatttgacactggggaacaatgatgagcaaaaacacagttcctgccctccttgagcttaaagttaagtggagaaaataagtaatggcacaaaatgcacagctgcaagttcataagaagacaacatagaaatttggcctcattaaaggtttcccgaagaagtaatgagtttttaagagttgacatgtagagatcaccagaagctaaatccaagttttgattcatagaaacatgaatttttaaatgaatgataacatttcatcagaaagcaagtattattaccttagtgccttatacattttagcaaagtaagcatttgaaattttaaaatttgaaccaattttggttagaaatgtgaacttttaaagttttttgttcttttagaggccttccaagaaacctaaaaatatgaaaatggtgcttattgctagtcattaactttcttcttcatgttgatcaccttcttgaaggtaaaggatggagagagaaatatacctttttaaaaccttctaaatgcttgaacagaactgtcctgttttttaaactgtaaattgtcatttcagtggtctccaaaactaccaccaacattcctcttgtgaccatttgaattctccctccttctccctcatcagactcaatgcccctttaaaaaataatttgtaattatgctgaactgaaaattacaggtaatataacctatgtgcataatgttaaattttaaagagtctatcatgtccaaatataatataatgaaacataattgatgataaaatgtggtatgtaatatttgggcatgactaccctgaacgactttacagtgtagctggttatatgcttgcccctatatgtgtcattatcagcaacgccataaatacaaattcagactgagatggatgtgtgccaatatgattgaaataccataagtagcttagctcttggtgatatgatttttcatagtaataacttttggtaaagttctaagtataacaatataatcttgggttttattcagctattgctgaaaaattcacgtatagtaaaaccatgtaagaattactctgtgtttatactatataaaatggcattcaagcccaggcctatgtttttgtttttgtggtttttttttttttttttttttgagacggcgtctcgctctgtcatccaggctggagtgcagtggtgccatctcggctcactgcaagctctgcctcccggattcatgccattctcctgcctcagcctcccaagtacctgggactacaggcgcccaccaccacacccagctgattttttttttctatttttagtagagacagggtttcaccgtgttatccaggatggtctcgatctcctgaccttgtgatctgcccacctcggcctcccaaagtgctgggattacaggcgtgagccaccgtgcctggccgcccaggcctgtgtttttgaatatccagcagaacattagaaaatgttgcaggtcagttcactatgccggattgtctcacacattggaggagtgcttgcgtcattgtcaggaacttccccaaccatggaaaacaagaagatgtgcctatttccaaaatatcctcagagtgtgttaacagcttcatcaagaaccactgccctaaaatatagagtgaaaaaaagagaaaagattaccggtttataagaggaagggcctttttgcttcctatttatcacagtcatgaatgttaaacttacacccatacctaaacaaacacacatgcatgcacacacatgtgcaaacacacacacacaaaggctgtgttttattgagggcaaatgtgagaatatattttgttcagatgtacactgagaaggcagtggtggaaagtgaagcagcaagtggccctaaactagaagagctagtcagcctctgccaggaactagcttgaatccacaaatgccacgcttgtcaggcccatcctggctttgcatccccactctctctccaccctcaagcctgcctttcattccctatccacttccttctagagtcccagtctctgcttctcactttgcttcatcatcagtcacatgatgcttggggaattctttctttagggagatcactatttgttgtagtggagatgcagaagagaggatgtgctgataattctcagaaagtgttatggctggtgtttgagtcctatattatcaaatttcaggaatgttagaggcttaagtctgtgtgctggcttaaagaaagcatgtttcaaatttcaagaaactaaattactaacaaacttctgtaacctgttcctggggtaggaattgccagttctctgaagtgacttgaaacaatttaacaagttcagccctgaaatctacatatgtatattttataataacccatataactcttactgattcttacactttcccagttctctggtttttatctggtgcatgtgttgcaatatgcaaaggatgacaatcttatttttaactttttattatttgtactttcctttttgtttcgttgttttttgtttgcttgttttgagacagaatctcactcacccaggctggagggcagtagtgatcacagcacactaactcaaactccagtgttcaggccatccatcctcttgattctttttgagtagctaggactgcagatgtgcattgccatgcccgactaatttttttttctttttagttgaaacaaggtctcactatgtttcctaggttggtcttggcctcaagtgatcctctcacctgggcctcctaagcactaagtttacaggcatgagccaccatgctgagcctatactttccttttctcgacagattgaattaactagaactttacagttgataataacacagatatctctgatatctgtaatagttaatgtcatcatattattgagttctttatcttaaattaaaacaaatatatatatccgcagtggtcttcactaccaagtcatcagtaggggggtgatagtgatggagccattctttacagaaggaaattccaatggaataaaaaatgagtgttctgttaaaccattttctctcattttctttctttcttttctttctgtctttgtctttctgtctttctttcctgtctgtctgtctttcatctcgatctgttgcccaagctggagtgcaatggtgcaacaatttcagcttactccaacctctgccttctttgctcaagccatcatgccacctcagcctctccagtagctgggactacaggcatgcaccaccagactcagctaattttttgtattttttgtagagttggggtttcaccatgttacctaggctggtctcaaacttctcatcccaagcaatccacctccctcggcctcccaaagtcctgggattacagtcatgtgtcaccacacccagcctttgttaaaccattttcaatgaaactggaagtctgtgttaattcatacatatggtgggtgagagaaaggcttccttataccacactgaccctgctgatacaacatcttccctctcttctcagagactagtggaaagtcgccgacagcagatcttgagggagtttgaagagcttcataggcggctggatgaagagcagcaggtgttgctttcacgactggaagaagaggaacaggacattctgcagcgactccgagaaaatgctgctcaccttggggacaagcgccgggacctggcccacttggctgccgaggtggagggcaagtgcttacagtcaggcttcgagatgcttaaggttcgacctttgcccctgcatagcccctcaggctgagtgcagcgtagctttgcgtagcctgggatttgtcagcctgggatactcattcttctgctctccttctctaaatccagttctttctgccaggtgtactcaaagggtctttgctacggaaaagtgatttctcccatccccttctaaccatttttgtgttcttatctctggtcagcaattatgtgcttaatctgttccaaagaaaagattcattcttttgaaaggagggaagtctagcctgagttagtgaaaaactatgcattaaaaattttgtaaatgcagttaccattacttttaagtcctgaaatttgatttatgtactgctgaaaaaggacagaaacatagtttaaaggatacaggcatacctcagagatattgtgggttcagttccataccacttcaataaagcgagtatcttgataaagcaagtcacattaattgttgggtttcctagtggaatcatatttttgctggtggagggtcttgtgttagtattgactgatcgaggtggtggttgctgaagattggggtgactgtggtaatttcttaaaataagacaacgacgaagtttactttcaactcttccttttatgaaagatatctctgagcatgtgatgctgtttaatagcattttactcaccagtagaacttctttgaaaatctttgaaaacccacatttgcagttacttacaacatgggagtcttgaacccctaaaagtcatccataagggttggaatagacttcttctaaatgcctgttaatattgatattttggcttcctttcacaaatcacaaatgttcttaatggcatctagaatggtgaatccttaccagaaagccttcaatttactttgcctagatctatcagaaaaatcactatttatagcagctttatgaaatacatttattaagacttgaaagtccaaattacttcttgatccatgggctgccgattggatgttgtgttagcggacgtgaaaacaacatgaatctcattttacatctctatcagaacttttgggtgatcaagtgcattgtcagtgagcagtaatattttgaaaggaatctttttttctgagcagtaggtctcaacttaaaattttcagtaaagggttgggcacggtggcttacacctgtaatcctatcactttgggaggccaaggcaggtggatcacctgaggtcaggagtttgagaccagcctggccaacatggtgaagcccaatctctactaaaaatacaaaaaaattagctgggcatggtggtgggcgcctgtaatcccagctactcgggaggctgagggaggagaatcgcttgaacccgagaggcagaggttgcagtgagccaagatcatgcagttgcactcctgcctgggtgacaagagtgaaactccatccccccaaaaaaaacttcagtaaaggctaggcacgttggctcacatctgtaatcccagcactctgagagatcaagccaggaggactgcttaaggccaggaattcaagaccagtctgggcaatatagcaggaccccatctctacaaaaggtaattttttttaattaaaaacattcagtataccatgctgtatacaggtgtactgtcatgtaggctttgttattccatttctagagcacaaggaaagtagatttagcataattcttaagagccctaggatttttgaaatggtaagtgagcactggtttcaacttaaagtcaccagctgcccttgcttctaataagaaagtcatcctgtcctttgaagctttaaagccaggcattgacttctctcgaactgtgaaagccctggatagcaccttcttcaatagaaggctgtttgttgacattgaaaatgtgttgtttagtgtagccaccttcatcagtaatcttggcaagatcttctggataacttgctgcaacttctgcatcagcacttgctgcttctccttgcacatttttgttacagagatggcttcttttcttaaaacaacctacctaactttaaacttttcttctgcagcttccttacctctctcagctttcatagaactgaaggagttaacagccttgctctggattgggctttggcttaagggaatcatgtgatcttatatccagatcactaaaattttctccatctcagcaataaagctgtttcactttcttatcattcatgtgttcactggagtagcacttttaattttcttcaataacttttccttagcattcacagcctggcttggtgtttggcacaagaggcctagctttcagcccatcttggctttcaatgtgcctttctcactaagcttaaacatttttaggttttgatttaaagtgagagacatgtgattcttctttcacatgaacacttagaggccattgcaggattattaattgatataattttaatatcgttgtgtctcggaatagggaggccagaggagatggagaaagatgagggaatagctggtagtggatcagttagaacacataaaatatatttatcgattaagttgttcgtcttatatggatgcagttcacagtgcccccataacgattacaatagtaacatcaaagatcactgatcacagatcatactagatataataatgaaaaagtgtgaaatattgtgagaattaccaaaatgtgacacagagacatgaagtgaacacatgctgttggaaaacatggtgccagtagacttgctcaacacaggttgccacaaaccatctatctgaaaaacatacaatgtcaacaaaacacaataaagcgaagtgcaataaaatgaggtatgcctgaaattgtttaaataatatattgcttttgatatgtatatattaataatacctctaaagtgtttgaaatattttgttctcttacgtaaatgaatggtgttagcaaaactagggaacatattttttatcttagagattagattaccagcatttgaagcagtgaggcttcattgtacatttatttttatgttacgtattgcttggtatttgttcctatggcctttcatgtatgtgtgttctgccttccatattaaactgggaaatccttgtgggacagagatttgtcttctttgtcttctggaccccaagtattcacaaatcagtattagcacacagttattaatgtgtttattcttgcttttttttttttctgagagagtcttgctctgtcgcccaggctggagtgcagtgcatgatctcggctcactgcaacctttgcctcctgtgttcaagcgattctcctgcctcagcctcctgagtagctggggttacaggcgcacaccaccacacctggctaatttttgtatttttagtaaagacagggtttcaccatgttggctaggctggtcttgaactcctgacctcaagtgatccacccgtcttggcctcccaaagcgctcagattacaggcgtgagctactgtgcccagccagttattgatgtttattaactaatgcaagacaggggataccaaaccgtaacaggaatgtgtgatttgttcctatgccaccagtctggaactctctgtacttatcctcaaggagagtgagatatgtggttggtacttgggggacagagtaaagaattgatacaatccctgtcccttatagggagctcccagcatccttgaggagcaaagacaagcataaaagaaatcattgggaagtgatataaatgaccaagcttcatgatgaccagaagttgaaagtagggattaggttgggagaagtgcattcaggtcccgctggagctcttcttgcactgtgtgaccctcagtttatcctatccctattttatagctgtggaactttggggaggagggggaaccttttgccttcaggaccactgaataccaggaccaatattgctttcttttctccttccttctaggatgtcaaaagtaccctggaaaagtaagtgattgttgtatctctctgagtgagttaggtcttggcttagagaggaggggtacagtcaggagtttgggttgggggtgaggttgggaaagtcatgtagtgtgtctgggcagggtatgggagaatgttcattgtgcccatgaagccagttagagaacaaattattgggaataataatcccttttcccctttgaacatcaggacttcttgagaaggagaatgataaggtagaatcagattctacttgtgccagtgggtggaattgtgtccaaacaagatggcaggaggaaggggttgggagagcagggagggcaatcatccatttgcatgaaatacaggaatattcctagaaagttcggaggctcactctcaacgatctgtccacgggatcataaggctctccttggattagtaaaagaaatcaacaggtgagcttttcagggaggaggaagaaagtgggaagatggagaattttaatttctccctaaaaatgttaacatctgaatagtcacttggctggagcttctccctaaccctgccctttcttcccctatctccctatccctcctagatgtgaaaaggtgaagaccatggaggtgacttcagtatccatagagctggaaaagaacttcagcaattttccccgacagtactttgccctaaggaaaatccttaaacagctaattggtgagttgttcccaaaaggaaactagaagaaaccactagagagaagaaagtttttaggtcctaccttatatgggtttcagttatcctatgtctcacttttcttactcccacacacacctacccctttatctggcttttagtctcaccctgagtcacagaacttggagtgagaggaagccttaagcgttatctactcttaggtccattcttttctaaatagagacccagaaaggttaaataatttgccaaagtcatcgggtagagtggttatataatttaccatgtaaacttgcataaccttcaaaggccgggtgcggtggctcacatctgtaatcctagcactttgggaggccaaggctggtggatcacttgaggtcaggagttcgacatcagcctggccaacacggtgaaaccccatctctactaaaaatataaaaattagccagatgtggtgttgggcgcctgtaatcccagctcctctggaggctgaggcaggagaactgcttgaacctgggaagcggaggttgcagtgagctgagatcacaccactgcactccagcctgagggacagagtgagattccatctcaaaaaaaaaaaaaaagaaagaaactgaaagggagtgtcattatattaatgtgaatatgcagggaaaatagtcataaaccaggccagttcctggaaaacacacatggtcaccctatccctagaccatatgctgtcttgctcggcatccttcttaacactttccgtttttttctgcccctcagactacaccttgtacttctctacatagtgagataaatgataatgtcagagggagatgaagagaggaccaggcgggaacctagattaccagccactgcagactcaagagattattatctgtttactttagggtcagggtgagaagtgagccattgctttctccccttccttaggtgacaccatggattgagaaagttaaccaaaccaggttgttctggggacctttaagggaccaggctctgtaaaggcaggctggaagagtgaggcaggggcatttagctattcccatcctcatctagctccccactctggcttctcccgccagcggatgtgaccctggaccctgagacagctcatcctaacctagtcctgtcagaggatcgtaagagcgtcaagttcgtggagacaagactccgggatctccctgacacaccaaggcgtttcaccttctacccttgcgtcctggctactgagggtttcacctcaggtcgacactactgggaggtggaggtgggcgacaagacccactgggcagtgggtgtatgccgggactccgtgagccgaaagggcgagttgactccactccctgagactggctactggcgggtgcggctatggaatggggacaaatatgcagccaccaccacaccttttacccctttgcacatcaaggtgaaacccaagcgggtaggcatattcctagactatgaggccggcacactgtctttctacaatgtcacagaccgctctcatatctacaccttcactgatacttttactgagaaactttggcccctcttctacccaggcatccgggctggacggaagaatgctgcaccacttaccatcaggcccccaacagattgggagtgacaggttgggatgtgggaatgactggggtgaggcagggtcaagtgctacgggcctccttcccgtgtcctgctggaacgtcttcgtgtccacctgggtccagtcctgaatcatcttggagaaacaccttggtttctaggatggttttgtgtggagggggaggtaggactgggctggatgagagagcacagctgtgacttcctcctaactgtcagggtggggagctggttcccagaggattgtctaccctgaagtccatcaggttttctgttgcacaaggacgggtcaggaaggaaggagaggcttttccagaaacaaaaaatctgtgagggtctgacttgctcaaaccagaggaggaaacagaaacccctgcacatctttttagggggttctttgacccaggatagtcttgcttcttgaggtagatcacaggggtctgtgtacctctgaattcatgagagatgaatgacagatgctctcatgggtctagatattgaggagtttttctgagggcagagattggacatcaacaaggctagaagggtcagggaagtgggctaaaggaacagattcctagagattaatgaagaggagggaggtttctttggtcttctattccaagggtaaggttgcgattatgggtaagattggccagaggtaggaatgtggggagaaggagaggctgaaaagaaagcagaggagaacccaggtccctgcctcagccttcagcagagttggcttattgcctgcctctataccaataagtcagtcaccttgctcctctccagaggcaaagtggaagagatcctgcaagacacatctatcctttcacagtgttcccaagggaacttggaaaggagagtcaggtattagaggaaagagaagggtatttgtatacaaagccctggccttaaagaatgttacttagtagctactcccaaattgtcagccttcttacctggccaaggtgtccaagccagaaaggaaaaaaggttatggagtctttctcaccctaaggacagggtggaagagggtggtatatagggaagggccagataggcaacttcatttggcttgtgtgcatctggcctggaactggtgttaagccaggcttttgcttgtttgttgccatccctcaccctttgccatttcccttttcagagaatgtaaatgattttcatgttaggccaaaataaacaacttatagggtacatatgttgtcataaaaggtaaaagtgatgcatgccaaaccaaactaaaccaatttggattatctgctattcgggtaatcttcacagaaatgactgagagaagaatctgcagtttactgagggcatttcagttcctcctaccacctcaacaggactttgtccagactctcctcctcttacctttgtgccttgactgtggttctttgtggcaagatactttggttggttaaaataatatggaacaaaggatccactgaagtgatctctgtgttgtgtggtaatttggtgacagccttgtactgatgtgtaagaatcactgggtgttagacatgcatgttcctgggtctcacccttagtggttagtcaaggtctggggtgggccggacatctacattttatttatgagacagagtctcgttctgtcgcccaggctggagtacagtggtgatctcagctcactgcaacctccgcctcccaggttcaagcaattctcctgcctcagcctccagagtagctgggattactatggactatagccatgcaccaccacacccggctaattttagtggagacagggttttgccatgttggacaggctggtctcgaactcctgaactcaagtaatctacctgcctcagccactcaaagtgctaggattacaggtgtgagccaccgtgcccagcctacatctacattttaaacacaccactctcatttgagtccgaaaacccttgtgaaactagttccagaggaggtttcagccatgtccttcctcccagctggagccctgcttgtctgtccccgcctggcactgggtctgaaattggagagaagtcatcctctcctgacttatgctgccctccccatctcagggttcattgatcttctacccctccaattcatgtccctctgcttctgacttcagtaactgatagtcactatgagtcacaggacaccagacagaagaactggaagatagaagaggtcagagggaggggtgtgaggtgaatgtcagtgtggggagtggggtgaagtttcaggggcaggggatgctgttgacagatttctgtgctgtacctaagcctaggagttagaaaccattcactcagaaagtgaggatcacctactgtgtgtccagcactgcataacaggaagtgtgtttctttggtaggtggaatagtaggagtaaactgtgctttctgaggaccgggagtccttttccctccctccagcaccctcatgatccttcccactttcacccccactggcaccagtgcttttttttaatgtattacctctgtgccttccgtctgtagatcttacaggcatctgcctcggacctcaggagagtagggcagaagctctagctgggtataaattgcacataaccatctccccaacgtagctacataaagagaccagccttctgtcctgaaaatggccgatttaagatcctcacctgctccactaggtctctaggtgatataattggtcatgagcttgaggaagacaaaagcactgaaaattcataaagggaccctgggcatggattgctggggttgtgtttagaaaccgatgagtttgtgaggcctccgggaggctcccgagggcgcggggactacgtttcccaggaggcttcgcgcggacgcccgggcggggctgtgcgaggggtggggctgcgggaggccctggagcgcggcggtgatggcggggccggtgaaggaccgcgaggccttccagaggctcaacttcctgtaccaggtgagtctgcgacaagggccccacggggacggtgctcggcgtcccagagtgactgctcccctcccgcaggccgcccattgtgtccttgcccaggaccccgagaaccaggcgctggcgaggttttactgctacactgagaggaccattgcgaagcggctcgtcttgcggcggtgagacagccacggggcgggcggcgggcgggacgcgggaggaacgcgagagggagcgcgggcgccagaccactatcctcctccgcccccagggatccctcggtgaagaggactctctgtcgaggctgctcttccctcctcgtcccgggcctcacctgcacccaccgccagagacgtgagtgctccaacggaggtggaagactgcggagcattgggggcgcggaggggggcggggtggggggcgggcactggaggccaacagcgcctttctcactgtagatggatgttgggtgtgggattcgcaggagtcttccttcttcgggtttggattaagttcctaacgccacttgcacaaactagggtttgggctcggctgttttttttttttttcttccagtgtgggcaataaataataacttttaagaggcaaccccacccatgcacaataatagatgttgttcggctttgtggaggacgattcccatcaccattcatttattaagcaaatacttattttctaaaatgtgtcaggtactgtgctagattcattattctcattgaaattacggtctgatgggacagactaagaaacaaaatggtgtagaaaaagattaactgggggagtagaatgctcacttactcatgccagtggtggcgaagtttatgataagcaaagggagtgagagatggaaattctaggcatgtgtgcagactctgagacaagagagcttgtggtgctgtcaaagaaatgagagttcaggaggctggagtttgaggtaggagggcaaaacatgagactggagggggaaacaggccagttcttgaagtcttgttagggagtttgaactttatcttaaagagttccaggaaatcgatggagcttatgccgaggcctgacaccatcaaatgtgcattcaaattgggggtgtggtgggggagcggggatacctactgaaaaacactggaggcaaaactggcagcaagagaccgttacttctaaacgtggacagtctttttcccatgttcaccctaggctgcaggggacagcgctggaccgtacagacctgcctaacatgccagcgcagccaacgcttcctcaatgatcccgggcatttactctggggagacaggcctgaggcccagctcgggagccaagcaggtgagaggtgagggagaaaatggaggacaccccagaggatagggacaatggagaacgtagagtgaagaggacacatggacaggttctgggttggtgtgagaagtaccacagtcagaaaactaattctgtttctctgattctgctcatttactcagattccaaaccactacaacccttgccaaacacagcccactccatttcagaccgccttcctgaggagaaaatgcagactcagggttccagtaaccagtgatggattcaccccatctcccaaataaagtttacttgttttacattccatgattctgttctgtgggtatttcaactcttaattccattttcttctgtttctgtctgtgtttcttggtcacctttgtaatcccaccatgcagggagatcgtgatttccatagaccacttggcctcactcagcagcttgcatttccaaggccatggccccagttccctatcaatgtcctgagccaccttagggcattccatgtttgggcagccataattgctgactgaagagctggagagaatgatgccactgctgctgtttttaaacaaggggagaaatatggggcagcggagagtgtttgtatcctctaggcccactcatagtcagaaaagactcaggtcttttcccagtctcaaagttgtctttaataaaattctgataaaggaaatggcgcaaacctgaactaacaaagtcaaagatgctaacaaaggacaccgacagacattttgcaattatgtcccataggtaaactctcagagttttcttaagaataaacaactaaaatgttttcttcgatatccctagaaagcctactgaagtacagaattcttagactgacctttttgctaaatgccagctaataaggttataccaaaagcatacaaacaaaatttactacttccagaatgcagttttcttttatttctcttataaaccctgtgtttgcttatcgatagctgtataaaaaaatcacttcatcatgttggagcttaaaacataatgatttattatttcctctggttctgtgaactaggaattctgaaagactttggctgggtggttctcctgttacatatgaaatcagcttaaatagctgcatttagctgctatctcgtaggtggtctggaagacccaagaaatttcactcacgtgtttagcacctcattgcttctccaagtagccttgctccctcgctagctttgatgttcccacagcatggctgactcagggtagttgtatttcttacatcccctctggcttctacaaaagcatcccaatatgtaagtgtttggctggatgctgtggctcacacctgtgatcccagcactttgtgaggccgaggcaggtggatcacttgagttcaggagtttgagaccagcccggacaacatggtggaaccctgtctgtacttaaaatacaaaaaaattagcagggcgtggtagcaggcacctgtaattccagctactcgggaggctgaggcaggagaatcacctgaacccaggaggcagagttgcagtgggccaagatcgcgccactgcattccagcctgtgtgacagagtgagactgtctcaaaaaaaaaaagtgtttatcgagcctctgttggggtcacacttgctaatgttcccttggccaaagcaaggcacagtgccaatgccagattcaatgtggaaggggctacactggagtttgaacgctgggaggttcattagttccctggggatcaccagtgtaacaatctaccacaggggtccccaacccccaggccctgtggactggtactgggctgtgtcctgttaggaaccaggctgcctagtaggaggtgagcagtggtggaagggagggatgggccagcattactgcctgagtaatcagtggcagcattagattcacataggagcatgaaccctactgtgaactgcgcatgcaagggatctgggttgcatgctccttatcataatctaattgctgatgatctggggtgaaatagtttcatcccagaaccatacccttcctgctccatggaaaaattgcctttcacaaaaccagtccctggttaacctgtccctagtgccaaaaaggttggggatcactcatctaccacattcttgttttgcctttgtccctgacttggtctctccactgcctccttcacatgtcagtaaattatttgcgtagaaaatactaaacagtgtacatgtaagtaaatgtttctgagtcatcctttgacattttatttctggaaatagtgcctacctgggtcaactttcagtccaacaaaaatgtgtagcctgaaagtaacacctcgtgcatacctgggtcctttgcatcctcagctcaccttccatggctcctccagtaagtttaatttgggatgactgagctcgactcttgcacacttaatctgatctttggctaagtttgtcttgagtgtgttatgattgcatgtgactgaacatgtctacagtgggatagcagtggggaaactgagtttcgatttcatggctcagtcactaagtgattcctctcatgtgggagatcatgggaatcaggtcccagtcaggatgagcggcagacaaaacagtatctggaatctggttcacttgtgagtctttgtggtttctttatttgttgtgggtttctatcaatatataactctaaagatcacagccctcttcctctttccacagccctcttcctctttcctttttcatgtttaattataaatatatgattacatatataacatttatattctatacattgatacatgattctatgtattaatacagatacatcataaagatatataatgtgatagtggcatattatatgcaaaaatggatttcctagatgaaagatgaaaataaactgaatccctggaatgcagtagctttctcaagtgtttctagaagttcaataactcaaaatttatgcccttttaggactctaaataaaattaaaggagagagaagaaacttaggttattcaaatcgaatcaagaaatgaggtcttccagtaaccatagaaactatgccttagtcactccctgaacattaagttcatttagcactttcaaaactagtgaaaaccagtatcgttattgtcaggaggcaaaagagagaaggattgagagactgttattttgaattcaagtagcaaaaacgttagaaaagacaggtcttgaacattgaggaatctgagttattgtcaccataataaatcagtgtgtatctctaatttaaaacaattatatcactatgaagatagtgcctatgcttagtaactgcttaataaattttcaaaactattttgaaatatagattcactggaagctgcaaagagcatactgaaatgtcccctacatcctcacccagtgccccccagtggttcctctttttattgtggtaaaatatacttaacttaaaatgtatcattttagccattttaaagtgtacaattcagtggcattaagtacatttgcaatattatacaatcaccaccactatttagttccagatctttttcatcatcccaaacagaaacctgtttccattaaacagtcacttccaatttttccctattccagcccttagcaaccactaatctgtttctgcctttacggatttgtctattctgtatatttcatataaatggaatcatacaatttgtagcttattgtgtctgatttctttcacttagcataatgttttcagggttcatccgtgctgtagcaaatgtcagtatttcattcctttctatggctgaatagtagccgattatatggatataccacattttgtttatccattcagccatcaatggacacttccgttatttctgctttttggctattgtgaacagtgctgctatgaacatttgtgtacaaggttctgtttcagtatctgtttttagtttttttgttggaggatataggtgcggttcgtttgatagttttatattttaactttttgaggaactaccaaactgctcttcatggctgctgcaccattttgcactcccaccagcaatgcacatggttctaatttctctccatcctaatctacacttactttcagtttgttttgttgtttattatagccatcctataataacattctagtgggtataaaaccgctagaagtcaatccaaaacactagacaaaaaccacaaaacctctttgtggttttgatatacagttctctaatgagtaatgatgttgagcatcttatgtgtttgttggctatttgtatattttctttggaaaaaggtcctttcaagacctttgcccatttaaaaaaaataggttgcctttatgttttgagttttaggaattctttatatattctgaatactagacccttatcagatatatgatttgcaaacattttctttcattccgtggattgtcttttcactctcttgatagtatattttgatgtataaaagcttttaattttcatgatcttgcagctacttcctcaagaaccaaactgtctctctcagaccttatcttctgcctccatcctgattctttttggagcttgttctaaccctggccctgcccactgtgaccttgacactacttaattaggaccccctcacctcctttcagacctggtgcctccaactatatcctgcctcactctgctttgaaacaggaaagtgttccccctggactcttagagtagatgtgggtatctgagtttctcttcctaaaatcctttccttcttagagcgatcaatgagccctgttgaatggcctatggaagggaaatgaatgttctaaatttcctctgacccttttcttcggacccccaaaggcattccccaccagcacccactatgaccccatctctgactgtaataccaccctgaggtgctgggccctgggcttccaccctgaagagatcacattgatctggcagcaggatggggaggactatacctaggacatggagcttgcagagaccattttatctttttgacaacttttttttttttttttttttttgagacagagtctcactcttgcccaagctggagtgcagtggcgcgatcttggctcactgcaagctccgcctcccaggttgatgccattctcctgcctcagcctcctgaatagctgggactacaggcacccgccaccatgcccggctaattttttgtatttttagtagagacggggtttcaccgtgttaaccaggatgggctcgatctcctgacctcgtgatccacccgcctcggcctcccaaagtgctgggattacaggcgtgagccaccgcacccggctgacaacgttttttaagctctctgtactgtatatacatctaattcagtgttttggactgccatagattatgcttttaaaacattttgtttatcccttttcttatggatagtcaactagtttgcttccaactatatgttaccatatatatctctgtagtagaattctagaccatggacctatgagagtgggcctctggagtacttagccacaattacaaattggattctaggtttgtgtgtatggaaattacctgaggaaagtcaaattttccttcagcttccacagtctatactccctagcaatataccaagttcatctttctttacatgctcagttgattttaactgacttcttaatctttgtcacaatctaatcagtatcaactctttccctttcttgttgtaacttgagtttctcttattgccagtgatactgtgtagcttcaaataagtcatcatcattcatttttctctttctttgaactgcctattcaaatgtttccccctatttttccactagatttcatggtgttcttttctttttgctttgaagggtgttatgggctaaatgtttgtgttcccccaaaattcatatgttgaagccctaacccccagtgtggtggtatctggaggtgggaccctggggaggtaattaagtttagatgaggtcaggaggggggggcctccgtgatgggattagtgctcttttaagaagagggagattggagctctctttccctaccttgtgaggacaccgaaagaaggcagtcatctgtatgccaggaagaggatcctcactggaactgaatctgctgtcacctccaaaactgtgagagataaatgtctgttgtataagccacccagtctgtggtatttgttatagcagccatggctgactaagacctaaggttttggttgttttgtttgtttgtttgtttgttttcttgtaatggaaaagaattcttttagagttttacctggtacatttgtgcctttaatacattttgagttgatttctacagattgtgtgaagtaatctgctggttctctaaggcttcagtgaatgcctcctctccaagctgcacttgagtcctcccatctgcctgggcctggagcttcttatgaagcctcagctgcaagcagtggtcagtggcaatttctttcaggagagagcctgccttcagccagtctcctgacaaacagcatgctggaagcatcagcccttcccactgcctttgctttctgttgatgacccattcttcatggagagtggtgtttctcttgtccttaactcaactataacttttctctttttacatttttcttattgccatgtaatttggggcagagagtctttgcctaagcatgaacttattgtgccatcctgaccaaagcctgtcatttagggatgtgtcctgctttgtggtgggtcattctgaaattacccgtttcagcccagtggaatttaaccagaactgtgggattgaaactgtctcttgaagaggaactgtggggaaaatgaacaaaccaacattcaggctcagttggagtatgcttttaggctttcccaggttatggagtataaagctaattgttgattcattccttcttggctttacagttgtagaaagagatctggcctaaaatccctataactgggacaggctgagtccaggctctgacattggccagctgtgcgactgggcaatattttgtttcactctctagcctcattttcaataggtaatacatgcaagtagcaggaaattcagaaagtatgcaaatagataggggaattaattttccagctacccattttatcttccagaggagaatacggtaaaaatattctggatatttttgtaaatatatataaacaagttggtattgatttaaatttttctttcatacaaatggtagaatactattctatgggtcatatactgctttttatttagcaaaaaaacttagtgctcttaccattttagtatctaacatcagcttcattatttttcatcactgcataatattctattgtgtgggtataccataatttatttagtctgctccctgttgagtatttaccttctttcaaatgttctgcccataaacaatatgtaaagcttaggtatggctatacatccagcatggatgagtcttcaaaacatactattcagtggctgggtgtggtgcctcacgcctgtaatcccaacactttgggaagctgaggctggtggatcacctgaggtcaggagttcgagacccacctgactaacatggagaaaccccatctctactaaaaatacaaaattagcctggcttggtggcacatgcctgtaatcctagctactcaggaggctgaggcaggagaatcgcttgaacccgggaggcagaggttgcagtgagccgagatcacgccattgctctccagcctgggcaacaagagcgaactgtctcaaaacaaaaaaaaaaaagaaaaaaatcaaaccaaaaaaaacatactattcagcaaaactccagatacaaaagaacacatattgtatgattccatttatgtactgttcaaaaacaataaaatatgaatatacatacagacatataatttattatttagtgatttcttcttaggtgggaaaactttgaaaataaagcaagaaaacatcgcctgaaaattcagggtagtagccaattgggaggggatgtgattgctggagtagaggcacctgggctgccagcaacgtttaatttctcaagtaagatagtaggtacattgcatgtatgcttcatttagctgtacttttttgcatttatgtcatgttattgttcacgataaaaacgactttaaagtgaagtgaaaagagtactatgcttaagctttttgctcacattttattttacacctgggtctttatccacatgataaatttctaaaggttaagttgccagatcaaatacttttgcagttaaattttgatggaaaataccagttgcctttcacagaaattacatcaatttactccccatacaaaacaagacacaaaatagtgtctgattaccttaccttcaccagcacaataaggcatcatcaaatctttgggttttgatcacctgataaataacggtttctgtgtatgtgtgtgtgtgtgtgtttctgttatagggccctaataatgatttatgtaaatgtgtacagaagtaactctttcaagtggtcaggctccagtgggtgggaaacacctttataaaaaaattgagaaattttgtagtcttattccagcctaatgtaaaaaaaaaaaaatcaagaactgcacaaatgtgatttatgggtattgtatcccaaacggtcccatctctacttaacaaatggattgacccatcctgatatgtctattttttcatttcctaaaacaaatgaggcttaacttctctgacccaaattgtccttgctgtgcttcaagggggacctaggcaaggatgtgggtcaggggcagatggactgaaaacgtgtgcagtgagtgagccaatcatgttttaggaagattaaagctcctgagacagaggactcctaggcagagatggcagcgagctccccagctcaggcttttagcaccgccaactctctggtaaaagcagctgcacccacctcttcccttcactctcacctcctatgttcttgggcatcaaacgtaattttgcttcagagctcaagggcagtgcagcctaaggaaaacttgtaagaattcctcagtcttgaagtcctttgcctgaaaccaaggagagatcaaggcctagggagaagaaggggaacattctctttggaatgctgggtatttctaagcaggagtagggggccctgccctggagggaaggtttgccttgaactgctctgcctgcaccctgccccaaactctgcactctccaggtcctaatccaaacaagtacaacaggaggctgagtttgcagtggagagtgaaatagcatgatagttacaaaattgtcaggacttgtatgtggttggatgctattgtttttatcttctttcattcactgttttctgcagtatcacttttgcccaaatatatttaaagaaaagaattgtatctctactttcaatttaaaactagtatttttctaatacattaaaataacaaaggaaccaattatatattaatataaacaaaaaactaaattaaaaactaacttgggccatgtgtgtctataatcctagcactttggggggctgaggcaaaagaatcgcttgaggccaggagtttagaaccaatctgggcaacatattgaggcgctatctctataaaaattaaaaaaaaaatcagccgggcctagtgacatgcatagtcccagctacttgggaggctgaggcaggaggatcgcttgagcccaggagttccaggttacagtgagctatgatctcgccactgcactccagcctgggcaacagagtgaaatcccgtctttaaaaataagaaaaactaatctgtcattctgccaaataaagatgcctctgggaaatccaactctgagtgatgtctcagctatcttctacacatcagttctcaagtgaacccccttccctcaggacatgtggcaatgtctggatatattttgatgttgtcacaatcaggaaggtgttggtgttacaggcatctagtgggtagaggctaggaatgttgctaaacatcctacaatttacaggacaacctccacaataaagagttatgtggcctgaaacatcaagtactcactgtaacgctgaggttgagaatccctgctctacacagatcctctgagcctgatgctccaggcaggcttcctcccctgtaatacccacaacacctgcataaattgctgtgttagctcttatcacactgcaaggtcattgcatttattgtctcctctttacaactgtgggttcctggaaagcaggggctctgtctgatagctatgttttgtaactatgtgttttatgccttatatttttctcagcacttgaacattgcctggcacataatatttgctccacaaataactgccagaggcatgagtttagttttgagacacctaggaaacagcagaaattagcaatgattagtgagataaagagaaggttattaataaagccctccctttattacatcggtccttcctaaaaccccagtgtggatggtaacatgattacatccattttatacataagttaattaatgcttagataatttacatgacgtgtctaagatctcatgactggacagcggactagttgagactctcgcacaacttatctgactttaaaacttcaattctcctattattatgcaaagactgccccttaaatatactcctactaaaagactatgagtggccgggtgcggtggtttgtgcctgtaatcccagcactttggaaggccaaggaggccggatcacttgaggtcaggagttcgagactagcctggccaacatgatgaaaccccgtctctactaaaaacacaaaaatcagccgggcgtggtggcgcatacctgtagtcccagttacctgagaggctgaggtgggagaatcgcttgaacccgggaggcagagattgcagtgagccgagatggcgccactgcaccacagcctgggcgacagagcgagaccctttctcaagaaaaaagagaaaaagaaagaccatgacagacgcctctgccttcaaggtggccaactgggcacaaaatctttcctccttgactcttaagatattgttaaaacgttattaggggaactgaaatccaaattgtaaagaaggatgagtccagtggtgaaaattttccacaaatattagaaatagaaaaaaacccttactgacctatgaaagaaggcagaagtcccagcgcataagaaacgctagagggggctgtagcccagagaaaaccaatcaacctaccaaatagagccccagaaagaaacctcctcctcgcccctccgccttcctctgtgttcctgccgctcctccattccttctttggaagacgcagctcctgcattccttctttggaagactccccccttcaccgaggttacctaccaaatccgccatagggtgtggtccagggtcgagttatcacagacctgtctccccaaggtccccgcgtcgcgttatctaggcagaagcgctgaccccgcatccctcccgtcgggaccccacgcgctgccccagtgaaatgaaatcctggtgcttgtggcgtgcgctgcgcggttccactccgctgtgccttcctttccgcccgcccccgacggctggacgcccctctgtcgattggagcggtccttagtgctacgtgtcctgggatccccaaagttgaccgcccccacagggtgtgccaaagctcatcaagcgccattccagtctcaacctttatcttttacaatttaaaatttatttattatccatgtaaggagaataactggtacactcagcgcagttctgcatatatataggccataaaaggaaatgaagcttgcgtgacactttccgtgaaagcaatagtaccgaactacaaatcaaactgcatcttagccgatctcctgaagaagaggaaaagccttgccaaatgcgtcttcccagcaggatgcaaacctccttcagcaaacactgagtaaatctgggagtgctgagacatagtacaatgcgagttttcagtgtaattgaaaaaattgaaaaaattgaaaaaaaaataactaaattaagattttcgactgttttcaaggacagtactgaggcagcacgtttgcagagtgatatttttcaaaaatgctgtaagaaactataaaatcagctggagatattctgttgaaatgtgtttttctacaaagcagagtcaaaaaaacacacgctatgtagtacacaaataaagtggaagctgtcgatacacgtataaatataaaggatttttgcttacacaaaaaatattccaatgtcccaatatgcaacattgctgaacaaatatggagctaaacaagtggcttctaatgaattattctaataaattttactccgataaattacatacttaaaatattatatttaaaaacaaactggagagctgtagaagaaaccctatttatcctcatgtgaagtttgagatttgtttgtaattttttttaaattaatgcaggagagaagtgcgtcgttgaaacaaccacctcgagtaaaacagcatttcttctcaccacacaacaaaacaaaaaccccacttgctgcatttcagtttagaatttattgtgttcactttaagcagggaatgtatcaaaactcaaaatttagcagacgttttaatgatttaagaactattatagaaaatactttttttccaggaataagttgctatatcttaattactaagtaaccccaattcctattgcttttagaacttcccagtttgcttcagagttcaacggcccagtgtgcaaaactgactcgtgaattttgtaggtgatgtggattcaccctgtctagcaggagtctgcagcactggctgaaaaaactgtttctgtggtgcctgatgagagacttatgcttttggcaattgcatacttagatacgtcaccctgtagagccttcactgcttcccaatccacccctcactcccacctaatctctgaccaggagtaaaccctaagatgagcttagaggctcctgtggctaagggcagtgaaatccactaaagtgtgtcagggctgagagaatatcggaattctgcaactgtgccccaaattcaggattctctactttcagttcatcgtggcttttgtggagcagggctacacattgtgggtaatctgtggggtttcagttacctattgcaagacattgtttactcttctcactccatgtcctttatatggtgcagtaaaactctagtgggggctgctggtgctgggtgttggcgggggcctcctacccagcagctgctgctgctgagctctggaagtttgctatgggccatggattgggtaatgtgtgtctaggttctatgtaggaaggctgaccacttccacctggagccatagctcaggaaggaggcagatgaagcagatgaataatcaccagcatgtctggaaagagtgagacactctggagactcaagggacagtgttggcgatttattggaggtttgcagtgtcacaataggagggtgtttcaataggaggaaaacatggtccaattgaagaaagggccagaaggaagaaaagaggaagatgggctccagtgctagaaaagagagaccaaatacagtcgaaaaagcagagaaatgtatttttcctcaagttcttctgctgtcactttcactgcagatctcagctttgctcttccagagtccctcctttggcactgcactgcagccctctagccgaccgagggcggctcctgttctctctgcagactgcacatccctgtcctcgctcagcgctccccatctgctgtcgctccttccaagtgcacgaatacttagagcttaatccccgcaaacctagtttgcgtgacagtgccccaagccgggagacccacagctcctttccctctggacctctaactgacctgcagcagcgggcttagtactcagctcagcacgcttctggtctctggttcagccttctctcccacctaggcctatggagctactccatctcaggcttctgctcttgtctggggtgcgaatcgtagtgtgtggccacttccccagctcagatcatcattgcctgtccctgggatttctgccaaaatttcccaacacatttctttgccttcagtcttgttctcctccaaagactgcctgcaaccagagaggtctttgtaaaggaaaatgtcatctgtctctctcctacttcaaaactttcatggtccacataatcatctcgattgacacagaaaagcatttaacagaattcaacaccctttctgataaaaacattcaacaacctaggaatagaaggaaactacctcaacacaataaaggcgatatatgagcagcccatcactaacatcatattcaaggagaaagaatgaggaaggctttttctctaccatcagaaacaagacaaatatacctattcaccacatctgttcaacttagtattggaagttctagccagagtaactaggcaagaaaaataaagtaaaacacccaaaatggaaaggaagaagtagaattatctttgttagaagacagcatgatcatatatgcagaaaaccctaaggattacacacacacacacacacacacacacacacacacagaggaagagagagagagagcactaataaacaaattcagcaaagttgcaggatacaaaatcaatatgtagcagtcagttgtatttctataccatgccttgcaacatggtgtttcttctagtcctgaagaggcaagttgacccagtccaggtagagcaccgacttagaaagagaaagaaggaaacagctgaaaaaatctgagaaggcatatcaacttgtgagccaaatataaatcataatgtgtgttagattaacgaaatgtactttctcatagtaatacagtatttctaagttctgctcagatactgttactgtgtatgtttctagaaaacacagccccaaatgtgcatagtcttgaatacaaaagaatcaaaagccatcaatatgtggtataaatccttaaagcattttaattgctaaaaatacatgccaaagtcacagtaaacaacattgctctgcaaatataagatataaataatttgcctctctataataattttactcacaaattactacctgagtaatctcgttaatcgtccctaatctcatcctaatccccagaaactgtgagtgttgccttatttgggaaaaaggactttgtaaatgtgattaagaatcttgagagagattatcttggatttgctgggtgggcccaatataatcacagtggtccttatcagaggaggcaggaagtgtcagagtcagaggagaagggaatgtgatgatgccaggagagactgaagtgattcattttgaaggtggaggaagggcttacaagccaagtaacataaacagccttagaagctggacaggattggggaatgggttctcccctagagcctacagaaggaaccagcccatctgacatcttgattttagtccactgaaagtaattttgagtgaactgaagtccactcaaaattattttaatttgctgatttcaagagcggtaagtgaatacatatgttttatattaagtcaccaaatttgtggtaatttgttataacagccataggaaactaatgtactactttggtagtctggaagacaacccttccaaggatatccatgtcaaatccttggaacatgtaactattactttatatgacaaaagagtgaatattactttgtatggcaaaagatatgattaatttaagaatgttgagaggatgagctagcctggagtatctgggtgagccctaaatgcaatgacatgtatttttataaaagacaaggagagggaatttttaaaaacttttattttaggtttgagggtacacgttgaaggtttgttacataggtgaacctgtgtcacaggggtttgttgtacaaattatttcatcacccaagtattaagcccagtacccatagggaatttgaggttcacagacacacagagtagaaggtgatgtgaagacagaggcagagattggagtgatgcagccacaagccaaggaatgcctgcagccaccagaatatgacagatgcaaggaactgattctcccctagatcctctggaaggggcatagccctactgagatcttgatttggggctcctggcctccaaggttgtgagaagatagatttctgttgttttaaaccatcaagtttatggcaatttgttgcagcaaccacaggaaactaatacaactatcacaatctaatgtttaaaaagcaattaattggatggttgtaaggcaaaattatgtatctcaaatttaaaagttgatacctgtttgcaagaaactcattaaatgccaaagaagtacttgattcaaacaagttccttgaattcaaaatcaattatttgtatctaaaagtataaattgcgttctatctgcatcaccatatgttaacaagacaatgcaaagctcaaaatgtaattttgtattattttaagtatttgtgaaacattatacaaattaaataactttgttttaaaaaaacagaaacatcgctgtgctacagtattccaaaacttccaaagatcctactacccacttatgttgttattagacattataaatttgctttttgattcaaaaatttcacagtagtaaacagagctatttgttcctgaaaactgacttttagggtttgtaccggtgagaactttctccttcaggagcctgcagtatgtgtgggcaaaatcagattctatgatgcctggtatggaacttctgtttccttcagggtgacagagggtcatattgttctctgcagagctccaatgcatccccatcttcaatcccgccaggccaaaagcaatccctaagataagtctgggtctttgtggctgatgtttgtaaactgtgttgaacctgtaatgaggccttcatttccctttaggctttggttaaaagtgtgtcacaattgtggatcaatgattaagttaaacttctcatgaagtggcagattatatgctgtgcctggtggtgaggtttcaggtttcaggttcctgctgctaaagctctgcatcccttccactgcaggcccttacttggggcaacagtacttgtcctgtgaggacctgtcagtgtcacccccagtgctggtggtgctcaatggttgttatggaaaccagggattaggtaatgttctctagtttctacataggaaaactgatcacattcaactgaggaaacattgctcactaaggaaacggatggatccccaccaaactttcttgaacggcactcaacattggtccctcaatgtcagactacatgttcaacagagtaaaatatgcccctgggattctctcaagattgctcaaggctttgctttggtatgtcatcattttatgcatcattgttggaagcgagaaaagttttaacaattgtcatgttatatccagaggataaagctgaatctaatatctagatttctatgtatcaactggcaatgtttgggaaccggcaatacttaagaaccttataaagtcagggctttgaagtgtactttaaaatagatttcccatcctctgaagtacacaaacatctttccaaaggcacctaacccacaaggattcctcttgatagaaccagatgtgaagttgctacaaagaaatgatggtgtatgagaaaccatgacttcccagggtctgcgtttgctgaagtcactgattatgaagtcattttctctgtgggtttgggtgttaggaagaatccactgtgactccattgtggatccatcctcactcaagattcagaaaatcagcagcacatttggtcaacacggcatctttcccttgcactgctggatggagctagtccaggcgacatgaacttctttctctcactctctctctctttttttttttttttttatacaaagtcttgctctgttgccaggctggagtgcagtggcatgatcttggctcactgcaacctctgcctcccaggttcaagtgattcttctgcctcagcctcctgagtagcccatctaattttgtatttttagtggagacggggtttcaccatgctggccaggatggtctcgatctcctgacctcctgatccaccctcctcaccctcccaaagtgctggccttttcccttttgtagtcttcacagtgtcttttgatcttgggctccacagagtggcatctacagggcatagttgtcagtgactcagggagaccaggaggtggcaggcaagtgaggggaacccagaagtagccagtacctgttcaatgccagaaaaacctggccaggacatgcccttcagtattgagggacacagtggcagctgtggtgagaactgtggaaaccagcataaagctgaattataaatcagtatatgtggtccagtacagactgcttccaggctctctgtggtcacaatcacaattagaattggattataattaaatccaagtctctctgagcattatattgtcacagtctatcactgtctctagaggagattaaataaatatttttggatctatcattgatgcattatcaatgattttgtaaagtaaattatgaaaacctaaaaaaatgtctcctggctatttatccttcacttgccagtcactatgattgtctcttcccattttcctgttcttctcagggtgtttctgggaccttcagtagaaattctcaactccaggttttcagctgtttctgcacagaggacatagtcctgtcccaaactctctagtgtcacacacacacacacacacacacaccccgtcctgagaccccttcctttctctcaagtttctgggatcacatcacatgtcccagtggttgtacctccaggattttgaagtgtctcatctcctcctgctttcctaaggagaaaggatggaggaaaggagcctggtctcttcaggatttttttcatatttaggcccttctagcctgggaatgaaaggacaccacacattagtgagcaattatggaggcaccaagagacgtcatccagcaactgtgcatgggagggaggttcaacaggaggaccaaagagccagatcatagaaaggatcacgagaaaggagtgggggagctagcaggttcccagtggcaaatcaattacagagtagaccaaatgcctgcaagtgtgcagaggttctgagccaggggttattgtcttgtgcatcttctagctactttggatttaccttcccctacatgactcccacaacctttagctgctgcacatcttgttgagtgacaacctgcaattctactctactctgggctccacactgtgttgcccaccccgtcctagtgccagaaacatggaaaatcccagcccaggggctcccttgttcactcccattctgccccttcactggggtgtgcaggtgttagacctctcctctgctccacaagtgggagcttcaggctttcccgaccctgcccccgagcctttgtagctgcaccatctctagtgcctgtcctcctggatcccagcgtagtctccacagccctagatcttgtcactctttctgttgttcagagttcttcaaaatctcccaactcattttattgcctccagtcttgctctgacccaagcaagacttgggtcagtgccctacaattgcaggaatcctgctgaaacaaaaatccacttttgtttctttcttacttaaaatattttaatgactcactattaacctcaggataacacccaaattcttaaccaattttcccaaccctgtgtgaacaggaccttgcacacttttccaattttctctctctctcctcttgcactagccagtgattctgcttacagtttcacaaacatgctgcaaagcctttcattttttggtcggactaggtgttccctttgcttgggtctgcctaattcctgcttttttttttttttttttatacttggattcctgttggaagtttagcctgctttcctgaaactggctttgctctttctcctttcttttctcacagatcctttccttccttctcaaagcactttttgtagtagcttctattcatctggctcatgtatttctttctcactacactgtaacttcagaacataaatgcctatgtttatgctcctcactgttctattttcaaggaggagcacagaagctggcatattctgggccttcaagctgtatttgttggatagatgaaaaatagggattcttacagtaacaatgcacactgagagtgtctctccatagtgagagttcaagagacaacacatacaaatttaaaaaaaatttacttttaaaatgtgtaacattaggtatgacactaaaaaaggtgtccatctcccctactggacaccaggatcaatgaagacagctacactggcttacttacttttccctcaaacagtctacgtttgatccctgtttgttgaaatagtgattcacataaaatggatgagaaaatggagacacagagaagtgaaggactctgtctagaatcacacagctgtcaaactctcgggcttaagccatttccatgcctctgccttccaaaatgctaggattacaaatgtaagtcaccacaccagccagcatcatataactaatttgttattgcttaaaaaggaaaaaatggaaagtgagctgatggagaatgaaatatggacagaggaagatgatgggaagctttgaagggctgcccttgactctgtgtgtgtgtgcgtgtgtgtgtgcgtgtgtgtgtgtgtgtgtgcatgtgcgtgccccttattctctcttaagctacgtctaacctcatagggatcactggggtccctgtcagccacagccacacacatccacagaaaccttgacctattgacagatgtaagagggtggcctttgagagttctgaatccctacctcataggattctggatatctggacactttcttcttacgctgtttctgcatcgaccttagggactgtgtttggggtgtttcctgcactcatcttgtgatagagttctatttgctcctcagatggcctcttttcccttggagtggaaccgtggctatcagggtcttgggccgagcatccatgagtgactgtgtgagttgctagaagcaatcttatactttcatagccaccccacacttcacagtgatactcatctctaagaaattattcaaattaagagagaaagctacacatataaacaatttatggacttgattgattaacatggaaaagcattaactttccagttttctgcctctcactggaattttatccctacactttgaactcatttcaaacttctggcttaactaggaattgctatagtcaggctattctagacagctcctgtgagccactaggattcagagaatacaacacatcttttccaatttaaatatgtagttctagaaaaaaactattttaaggtcaggcttggtggctcatgtctgtaatcccagcactttgggaggccgaggcgggcagatcacttgaggtcaggagttcgagaccagcctggccaacatggtgaaacccagtctctactaaaaatacaaaaaataaaaataaaattacccaggtgtggtgacacatgcctgtaatctcagctacttgggaggctgaggcataagaattgcttgaacctgggaggtggagtttacagtgagcccagatcatgtcactgcactccagcctggtgacacagcaagactccatctaaaataataataataaataaacaaataaaaagaaaaagaaaaaactattctaaaattcatatggaaccaaaaatagctaaggccatcctaagcaaaaagaacaaagctggaggcattatgctatctgacttcaaactatactgcagtgctacaataaccaaaacagcatggtattggtacataaacagacacatagaccaatggaacagaaagagaactcagaaatgaggctgcacacctacagctattttatgtttgacaaacttgacaaaaacaagcaatggggaaagaattccttattcaataaatggtgctaggataactggctagtcatatgcaaagattgaaacggggcccccttccttacaccatatacaaaaattaactcaagatagattaaagacttaaatgtaaaacccaaaactataaaaactctagaagacaacataggcaataccattcaggacataggaatgggaagagatttcatgatgaggacaccaaaagcaatgacaacaaaagcaaaaattgacaaatgggatctagttaatctaaagagcttctgcacagcaaagaaaactagcaacagagtaaatagacaacctacccaatgggagaaaagttttgcaaactatgcatctgacagagatctaatatccagcatctataaggaacttaaagaaatttacaagaaacaaccccattaacaagtgggcaaaggaaatgaacagacacttctcaaaagaagaaatacatacaaccaacaatcatatgaaaaaagctcatcattgattattagaaatgcaaatcaaaaccacaatgaaataccatctcacaccagtcataatggttattattaaaaagtcaaaaaataacaggtgctggccaggttgctgagaaaaaggaacgcttatacactgttggtgggagtgtaaattagtttaaccattgtggaatacagtgtggcaattcctcaaagacctaaaaacagaaataccattcagcccagcaatcccattactgggtatatacccaaaggaatagaaatcattctgttataaagacatatacatgtgtatgttcattgcagcactattcacaacagcaaagacgtggaatcaacctaaatgcctaccaatggtagactagataaagaaaatgtggtacatatacatcatggaatattatgcagccataaaaaagaacaacatcatgtcctttgcaggaacatgaatggagctggaggtcattatccttagaaaactaaggcaggaatggaaaaccaaataccacatattctcacttataagtggaagttagattataacacatggacacaaagaggggaacaacagagactggggcctattggaggctgggaggagggcaaggattaggaaaaataactaatgggtactaggcttaatacttgagtaatgaaataatgtatacaataaatccccatgatacaagtttacctatataacaaacctgcacacggacccctgaacttaaaataaaagttaaaaaaacataaaggtctagctggatcagtgggcttctaggatccttcttcagtaatactgaggtaaatagcacaaaccatgagtttactcttttcataatccatgacacatcacacttaatatttgctgagtttaaacaagtctcttaaacacatcactagtttacatcagctgtggaatctttgctttgtcaatcaggggtcaacaagcccatctacacttgccatcattaactaatgtgcaggattgtgtcttatcaaatcagcagccaccttctctgccgagaagcaaggagtatgtctcccagaatccccttccctgtatagttccgattcacattttccaatcagagaaacttgcatgagatatggtgcccagaagagatggagagacaggcctctacccatcagtcgtggctgcaggcagaagagtaggcagatgtcaggttctcagtggcttctgtgctaggccaaagacccatctgctttgcctgtgcagaccgagatgaatggtgggagctttctcagaggttctggagaatgactgcaatctcccagcagggttctaggaacctcccacctgtgcttcaggctaagttcttcagcacatgcttccctgacctcccagctgcagcctccaagagctacaatggtgactggtattagtattctgtttctgctgtaacaaattactgctatgaagtggcttaaaacaactcaaatttattatcttacagttctggaggtcagaagtctgatatgggtctctctggcctaaaataaggggtcatcagggctgcattcctatggcggctctgagggaaaatctgtttcctcaccttctccacttcttaaggctgcctgcattctttggctcgtggttccttcctccatcttctaaagtcagcagtcccatcactttgacctctgattctgttgtcacatctccctctccaattctcactctgctgctacctttttcacttataacgaccattgtgattgtattggacctgcctgaataatacaggataatcttcccatctcatgagcctcaacttaatcacatctgaaaacttccttttgtcatattaggtgacattttcacaagttccaggggttaggacataggcatcttgggagacctttattttgcctacaacatgacttcaccaatatttgctctcctagattttccaacattagtataggctctaattcctatattgaacacgttattcctaaaatgttatactagagtgtggtggttttcctggaaaaagctacactaatacacttccttacctcagaagagctcaaaagttacctttctattatctttttttttttttttttttttttttgaggggagtgtcgctctgttgcccaggctggagtgcagcggcgcgatctcggctcactgcaagctccacctcctgggttcactccattctcctgcctcagcctcccaagtagctgggactacaggcgcccgccaccatgcctggctaattttttttttttttttttgtatttttagtagagatggggtttcaccgtgttagccaggatggtctccatctcctgacctcgtgaaccgcctgcctcggcttcccaaagtgctgggattacaggcgtgagccaccgcgcccggcctacctttctattatcttaaagtctccaaatggtaccaccatctcaaggtgcaatagctgtaatttaagcaacgactttgcgggggtgatggagggagacaaaaagaaatgactggaaagcacttctgattccatgccctgtccctggtgtctggccgtcttggactctaggctgcagtttctctcctacataaacccagtcatttctgagtctccaagagtgttttataggattcatgtccacttcttggctctgtcatcttctctctaccttgtcttatagctccgcgcttacattttcttctcacctactgctgtagtcctgccttgattcttcagccattgtcctctttttaccttgtgtatgcttaagccaattctccaagaagaaattccagatggctctttattgctgtttgtttgttactattttttatttggctgaagagttttcaagattcttaactttctatttttaaaattttagtgtacaaataatacatgctcagagttggaaatgaaatcatcacaatatgtataaatatattttaaaatatcttctatctctaaatctatgcccactttactaaggtaatttatgttatcaatctactctctatgtgtctactttctccattttcatacaaacataggcacctatattaagtgttgagtgtttttactttgtagcttttttttagcaaaagtcctcaaattttatttgtagtttaatcattttacaacaacttgagatataatttacatatcataaaattcacacattcattatatacaagtcagtggtttttagtatattcacatagttgtgccaacattatcattatcaattccagaacattttcatcaccccacaaaaaaccccatacccattggcagccactcctcatttcctctcaactcccctagccctaggcagccactaacctgtgttccatatctacagatttgcctattctggaaatttcacgtaagggaaattatacgatatgtggcctttcgtgtctggcttctttcacttaccgtaacattttcatggttcgtctgggttgtagcatgtggcagtacttcacgtcttttttattactgaataatatttcattgtatggatatatcacaatttgcctattcatttattagttgatggacatttgggttctttctattttgtgctattattaataatgcagccgtaagcatttgcgtataggtgtttgtgtggacagatgtttttgtttctcttgggtatgctgtatacctaggaggggatagctgggtcatatgctaacttagtgtttgacattttgaggaagtgctggcctgttttctaaaggggcttcacctctttatattcccaccagcagtatatgaagcttccagtttctctgcatcctcatcggtgttcattattatctttttattgtagccattctagtgggtggttacaactaagggaaaaaatcaaactttaaagaattaacttagttttatttggaaatcttactgaggactatagacggaggcctacaacccaagaacagccctttagagaggctctatcagactgtaccagctcagtatttcagcccactgcttatattataggtgttctgtattgcaacatcacatcacacttggtaagaagttacattaaagcagaatcacatcaaagtttggaagcaggaatacgtccagtgtagattacagaagcatgatcactatgcccgtcagacattatcttatgtgcagggaaaagcaagggcattcatcttttaaggaatatagtggcttaggcaagagacgttgggggctgtgtgctttatcctgttttgtcctcaaagcatctttccagagagttgcacatcctcacgatgaactaggaggatgtgcaactctcacagggactttgtgaaattatgctggcaagtaaaagtcagcttctgacatttactactttgtctcacagtgtgaaatactatcgcattgtagggccgatttgcattttcctgatggttaatgatgttgaacatgtttccacgtgcttattggccttttgtatattttcactggagaactgtaaatccaaatcctttatttttaaatttgattatttgcctttttactattgagttataaccggttttatatattatagacaaaattttctcttttaccatatgtatgatttgcaaaaattttctcccattctgtggggttttttttttcactttcttgatggcatctgtaaacatacaaaagtttttaaatgcgatgacgtccagtttatctttttcttctttttttgcttatgcttttggtgtcacatttaagattaggtgcctttacttaatccaaagccatgaagatttatgcctatgttttattttctttctttctttcttttttcttcttcctctcttcctcccttccttcctccctcccttccttccttctttccttccttccttccttactttctttccttttttttccttgagacacagtctcactctgtcacccaggctggagtgcagtggtgcaatcacggttcattgcagcctcaacttcctcaggctcaagtgattctcccacctcagcctcctgagtaggtgaaactacaggtgcatgccaccacacccggctaaattttgtattttttgtagagacagggttttgccatgctgcccagtttggtctaccaactcctgggctcaagcagtctgcccactttggcctcccaaaatgctgggattacagacatgagccatcgtgcctggcctgtttccttctaagagttttctaatgttaactctttcacttaggtctttgatacattttgagctactttttatatatagtttcaagattttcatttttcatttttcattcattgatactgtatagaaacacaattgatttttatattttgattttgtatcctgccaatgtgataaaattctttagttgtaatgcttttttaaagtaaattcttttggatttctatgtataagatcatatcatctgtaacgaaggtagttttacttctttcttttcaattcagatgagctttattttattttcttgttcattgtagcaaaaaattcaactattctatttataatgccctgttacttgatgttttttatttatattgtgaacatctcaccaatttcatagagaaagcttgagctcatcattttaaaccctaattccatagtattttgcatgcaactgcttctctagtgtaaatattcagatggtttcctttagttgtcactacactgaatgtccactgcacagacatctttacacacatatccttacagccatcccagagttttctgatttcccacagcactacatgatagtggttaatctgatgatctaactgactagctaggcagactgactgactgacaatcccattgcttctgtatataaagtcagtaactacatttggaactcagcttctctaggcccagccacgcttactttcctagtcttagaggttccctctctgcctctaaatttctctgtccctgaaaccacccttgtactccagcccaagagcgcttgcaaacaggtagaaggtatcatctggagaaggtaagtaagagacttatctccattcccttcatatctaattaccaaatcttccatctagctcagtcaggttgagttgaaaacatcttgactttagtcatttagccactgagcacatcatagctcttttcatacctcagtcttattcaaatatttaatttatcaagctcacttataaatgccaagcctctcatttggccacctctgaccctacagctccaaagcccctcccattttgagaacatgctcttgccaggccagtctcctcattgccccctgattatccatcactctgtccgtttctgcgcctttgctcattctgaacttcttgtcaattctcaagtgtcagcagccacctctagttgcaacagagtggactttgcttaatcttattgccctctcaacctctctagggcattctataggtagaatcctcctttttgtggtccctaagttggcctggatattacactctaaagtctagaatgcagtcatgccaaatcccacggagaaccttttataagtaactatttctggccctctcctaggcctacagaatcaatctccggaagcagaacacttcactcttaaaaattcttgggggattgtgagcagctagtcaatggatctggggttggtgtccaccataccacactccaagtcctcctagtttctgctttcctcagtcagttaatctgcgagctaccttgcttctcatcctctcttctgtgagaggtcaggcaccatgttctggcagttttcccaaacattcctctacattcttagccccactggtctcccctcacttatggaccttttatcattttatctaatggataaaggtttgtgtttatgttcttgcttatgcttccttccatcccttccaaattttaaccttcgtatatgcatttatttaacaagtattgacagcttactaattggaggaattgcattaggtgctatgattcaatttccccaaacatgtttttcatattcttatatgtatttaaaaaaccactgcatcggggtgacagaataaggttttaaaattctaatattagactgtccactacattgtctcagtctatctttctgttcagtcagttaattattaggataagaagataccatcaatctgatttttcccccatatttttaaaggagaggagagagaacaatttggaaggtcaagaagttggtatgcccaggagctcacaactctcacctttggggttttatggaatatttttaggccttatttatttattagtaaaaaaaaaaacagaataatgagttcttctctgacaactgtacaggattgtaaggatcaagtgtgtttatgtgtatgaagcaccatgaatattatatataatgtaattgcaatagaatatatatagaagtagaaatcatattttgaaatgacaagtggcagaaatatatattgaaaaatattagtggaggatgtcacaaagtttgagttacttgtttttcatttcattttaaaataagcatatctgagtatgatgagttctaaggattcctttcagggcaaaaattgaggctaccccattgcagttgtccagtctttccacaggatggcaaagtatagccagtatttctttgaaatgtttgcttgcttatgccactaaattttgaacttagccttctagaaatgagtttataacttatctttcttgaaggtaatctcagagtacctatgaaaagacatctataaaatacttttgcaaaaatacctaatacatcaaatgtgtgctcaccacatctcatcaaagcaaagtgtaaaacgttctcagggacctgtagagctaaaatgtcaccttctatgttcaagatatatgttgaattctatgtccgatttcttctcattattggacttaattctgtaaaacatgaggcttgaacttttcatgaactgattggtgcatcctctgcttaattgattcttcccatttgacttggaggatggtgttggccagaggtccttttttgcggaggcctttaaagatatttattcagaagaatgtaccacatgaggcatttgactaataaaaacactgttattaacactgacaataagcaaacacatatttctttagctgtcttgcaattggtacattctcctcttcccattgaggaagtatctgctctacccttgcttcagattaaacattttgaaactctcagttttaacattattgagccttactattattgaaataattcttttcccaaaacaccagactacactcaaactccagaagatgcccctaaccaagactaatattctgacatcaaaggaaatctgtggataagatattgggaacttctgaaaaattttagtagggctatgcctagagaattttcatgatcttaacaaatcttgctcattcagcaagtccttagagagccttcatgggaacctatgaaaaagaaagtcctcaatgtattacatggaaaataacgatagcaacaactataataataatagtggctgcatttaaagggcacttgctgtattccaggcattggcttaagtacctacataagttattttgttcagtatttatcacaaccatatgaaaaaaatgttcttatccacaataaagaaatgaagtttaggctgggtgttgtggctcacacctgtaatcccagcactttgggaggccaaggagggcggatcacctgaggtcaagagttcgagacaagcctggctaacatggtgaaatcctgtctctactaaaaatacaaaattagctgggcttggtggcgggtgcctgtaattccagctacttgggaggctgaggcgggagaaacacttgaacccgggaggcagaggttgtggtgagctaagattgcaccattgcactccagtctgggcaaagagagcaaaactctgtctcaaaagaaagaaagaaggaaggaaggagggagggagggaaggaaggaaggaaggaaggaaggaaggaaggaaggaaggaaggaaggaaggaaggaagtcaagaagtctacaaagtataggtaacttgctcaagaaaattaggttcagaaagtttaagtaacttgcccagggtaacacaattatgaagatttgaggccagaattcagttccaggcagttttgttctagatctattgctcttcagccactatagtgtcatgccaagactggcctaaagtcgtgtcttctgctcaaacaggtccttctatggcaatgaccatgaaatacatggctaataaagtattaggggcaggaagagggggaagaagaatgcagtatttgagactatggttactgactatatttaaaatcacagtttcatgactattaaggttctttttaaacttttctccctgatgtatcatggtatccaggtgaaagaggatctggctccctacatcccaggacgtgtagaactgtccatggttctgaaagacaaactagcaggtcccaccacctttacaaatggcaatcttactgtggaaaactgcactagtgaaaactctacatatgactttgtacatgcatcacttacaaggattcagcaatccttggaaagatgacatagaaagacccacagaatattccctttatatgccctatactaaaatgtacaaagcaaaatcaaattagacaacactatgatttagaagtttatcttgaaattttagatcagaatgtaaagaaaagaaatccagcattattgtatggacaagagagaatggatatagattttaactaactatatattccctcaaaactcatatgctgtcctttttaacctcaccttaatttaaatttaaccacacatttactttcatttttgatttttattttgtatttatgttttcttttatcttgtatcttccaaccaggatttcgccttttgcctgaagcatattctttagaactcccttcagtaaaagcgtgtttgtgtcaaattgtctttgcttggaaaaaatccattgagacttgatttttatattatcatgtatttcatttctaaatgttttatatttgtcttttcaatttttcctgaacattatttgtagtttctgattaactggaagtcttttaaagcctgttttttaatcacaggaagcagggctattttatgtcttattcttattattctgctgtatggtgtttctgcttgatctttcatggtgacttgtatcttgtaaatagttttgttgttgttttcctggtaagtgctcattttgcttatggaataattttaggaaattttaagtgtggttgatgacatcttcctccagagaggatttgtgtttgttttgcgtgttatttgcgtttgttttttgacaggttccttggagcctggcccactataaactgaattcacaacttgatgattgccagacaatccaggtagtgagaacttgggctgcaaatacatgtgtggggccattgtgtttactcccagttccactcagcaccaaggcagctgttcctgcagtcctttgagcatggggcatttctcttacaccgaggaactgaacttaggggtcccagcaaaatggaggagatcatcctaggagatttcccactttgagtgctacttgagacttgcctcctattccaaattccttatgaggccatggaaactaaagcttaacttgtctacattgagcaaatgagctcaggataaaagtaaattcagagcttcctgatatttattagacagttttcactgatgtgaaagcctctcagtgcttttatgatgtattttatcttttgataacccattttttgttagcatgagagtaggcgtagatacctaatatgccacattagtggttcacaccttatccttaaagctccttatcacaaaccttcccatcttgttcctttgaagtcattgaatacctgagcaaactattagtcactacccatgcattgatgaggatctaacaataagatatttctttaggcaaaatgaacttccagatggtctgattgaaaatcttcctgctggaggtactttcctttccactcttctttatgacaattcctgaaaagggctgtaatgctgcaaagtacacttttgggtattcaaagcatattcaaatttcttcttctatagtcaacagtccttagggaactcctcaagaccccaaggatgagacaagggagagtggatttaccagtggtaataagaatactaggaatatagtacatattatgaggcaacttggctggccttgctaaggaccagctcaggtctgatactgtatgtatatacagtatatatatccacttcctcctgaatgctcactgagtgctggtgaccataagtgaataaataaaatccaggtcatggtggacatctcaagtcacttggtcatttgctgtatcatgatcatggcattcagaatctaccagggctcagtagcaagccaggaactgttatttagtagaagaataaagaataaagcttttcttcgaagccctggaacttgagcagtgagctcctatgcctgtttcacacacacacacacacacacacacacacacacgcacacacacacacacacgcacacacacacacacacacacacacatatccaaggaagcatttaggccaaatggcagatatgtttgatgcctgcctggatcagaatgacatttccatttcttatggaatgttttgaacttgtactaacttaccggattttggtgcagagaaatcccctcacaagataagaaatcacattttttctttgttgaaattatttatcttcattaacgtttaataacaccggtgcagttatttttcaaagagcttgtactccaatcttggaggaattccttgagttgaaaagcccagggcctgaataatgagggagtctcatttccaacagcttccaatcagctgtaggattgaatgaagacacatgtgattgcatgattttaagagagggtaggggagagggacagtgcttgtttcacacttaactgaactacttccttggcctccactcaaatttaactgcagcattggtgacttgatttacagagtcagaaatttcctaggtatggaatgtgctgtcttaaatagtaatgagtccaatctatgtagagtgtccttctttatcattgggggtcatatgaagtcagcgattcttttagaaatttggggttacaaacagaaggcctcaacttacttcaatttgaaaaacctgaacaaggaatctctggtgtctggatccttatttgtctcacaaaattgaattgtgagctgtgacattttctcccaaaagtctcttttaggacagaacttctggtaatggcaacatgaacaggtagatcagcaagtcttcctctaaatagcaatatgagaactggacaaaatcataaaaataaatatttgaagtcactggaaaacaaacaaaggcgagcagaaatgtaatagtgctttgatcttgagactatctattgggtaaaagctgcaagttggtggcctttcctccttacctatgagtttgctccaaactcccagcaggtaactgcagccctaatggatcaatagggcagtttatagagttaaaagcccaaataagctaaaaatgtttacatttttacatgtttacatcagtcaggcaattttgaaagagatctgctgaagaattcagattcaaaatctgaatacaaactatgctcacatccctggttgaacactaaactccccatgggtgtgggacactcaggggaacctggggaaaaatcagaaagaacctagagtgaggtctacccttgaaagagtgaaataatcctggcaatatctgaaagtctgcagtaacatagactgcttgcatttgtcaacctgcatacaacacaggcagaagaaagcaaaaatcttactggactgaggggtgaaaaggcaggatgcaggacaatttagaggggattccagaagcaaaacaaacacagagaagctgaattgcaaaatcttagcagaaatagccccagtacttgttagtccatgttgtgttgctataaatacctgagagtgggtaatttataaagaaaagaggtttatttggctcatggctatataggttgtacaaacatggcaccagcatctcttcagcttctggtgagacctcaggagccttttactcctggtggaaggggaagggggaccaggcatgtcacatggcaaaagaggaacagggtgggaggagccagattcttctaaacaaccaactctctttcaaaataatagagcaggggccggatgtggtggctcatgcctgtaatcccagcactttgggaggccgaggcgggtggatcacgaggtcaggagttcgagaccagcctggccaatatggtgaaaccccatccttactaaaaatacaaaaattagcttggcatggtggcatgtgcctgtagtcccagctactcaggaggctgaggcagaagaatcacttgaacccaggaggtggaggttgcagtgagccaagatcgcaccactgctctccaggctgggcaacagagcgagactctgtctcaaaataataataataataataataataataaagcgaagagaacttacttatgactgtggggagggcaccaagccattcatgagggatctacccccatgacccaaacagcttccactaggccccacctgcagcattggggattacatttcaacatgaggtttggcagggacaaatattacaaagatgcagagtagacacccagagccccctgctgaaaatgcagcaactggatatcggtaaacagagcagaaacatcagctgtagccaactgcaggggtaacagatttcacagttaccagtgcagggaaagttaaccacgttcactgaggggcaggggtggtggtggtgggagaattgccatctttagagagattgttgtagattccagactctctaaaacaaaacatataatgtccactttatcaaataggatcagacatagaaagaaaagaaagaaatgtgtgactataataaggaggaaattaaaaataaatgggtttcaatgggtccagatattgaaattatcagcaaactctttaagacagttttgaaaaatatgtggaaagaaatgaaggaaatatcatttctaaagagtgaatagaagtaattgcagcagagaaatgaaaactatagatggtactaagtggaaattctcaaactggatagaaaaataatgacagtgctctggatgaggtcaacagaagttttgagatggcagaataaagaatcagtcagtgtccttgaatataaatcaacagaaattgtctaatctaaaaataaaaaagagtgaaataagattaaagaaaagtgaagaaaacttcacaaaccctcagaaaatataaagcaggtaaacaggtgaccaattggagtcccaaaagaagatagacacaggatcagaaaaaaaattcaaaaaaatctatggctgaaagattcccaaatttgatgaagaattttagcttatagatgtaagacactcatcaaagctgaatacccacatagaaaatcataggtagagtggccatggccttggctggcctgagggtgtgtcgctagccctgctgcatgtggtgtggtgcagggtgccagtgcctggtgggaccagagagctcccagcacagcctttgggcaggtgggaccgccgatcattttaaaataattttttattgatttaacttatattttgagttcaggcatacatgtgcaggtttattatataggtaaacttgtatcatggggtttgctgtacagattattttgttacctaggcattaagcctagtacctattagttacttttcctgatcctctccctcctcccagcctccactctctggtaggccccagtgtgtgcagttcccttctatatgtccatgtgttctcatcatttagctcccacttataagtgagaacatgtggtattcggttttcttttcccgcattaatttgctaaggataatggcctccagctccatccatgttccgcaaaggacaagaactcattcttttttatggccacatagtattccatgatgtatatgcactacattttcttaaaagagagcaggagtggctattcttatacaaaacaaaaacagactttaaagcaacaacagtaaaaaaaaaaaaaaagacaaagaaggacattatataatgatagaatgataattccaacaagaagatatcacagtcctaaatttatatgcacctaacagtggagctcccagctttataaaacagttactactagacttaagaaatgagatagacagcaagacaataatagcaggggacatcaatactccactgatagctctagacagatcatcaagacacaaagtcaacaaagaaacaatgatcttaaaccatatcctacaacaaatggacttaacagatatttacagaacatttcttcccagtaactgtagaatatacattcttctcatcagcacatggaacattctccaagatagaccatatgatagacctcaacacaagtctaaacaaatttaagaaaactgaaatcctataaagtatcttcacagaccagagtggaataaaactggaaatcaactccaaaatgaaacttaaaaactgtatgagtacatggaaattaaataacctattcttggatgatttttcagttaacaatgaaatcaagatggaaatttaaaaattctctgaaatgaatgataatagtgtcacaagtaatcaaaatctctgggatatagccaaagcagtgaaaataagaaagttcatagcaataagtgctgacttaaaaaagcctgaaagagcccgggcacagtggcttatgcctgtaatcccagcactttgagaggctgaggcaggtggatcagttaaggtcaggggtttgagaccagcctgaccaacatggtgaaaccttgtctctactaaaaatacaaaaattagctaggcgtggtggcacgcgcctttaatcccagctactcaggaggctgaggaaggagaatcacttgaatccaggaggtcgaggttgcagtgagctgagattgcgccactgcactccagcctgggcaacagagtgagacttcatctgggaaggaaaaaaaaaatctgaataagcacaaattgaaaacctaatgtcacacctcaaggaactggagaaataaaaacaaatgaaacccaaagccagcataaaaaagaaataataaagatcagagcagaaataaatgaaactgaaacaaaaataatacaagagataaatgaaaaaaaagttgggtctttgaaaaggtaaacaaaatcaatagaccattggtgaggttaaccaagaaaaggagagaagatccaaataagctcaattagaaaacaaactggagatattacaactaataccacagaaacacaaaagttaattcaaggctactatgaacacctttacacacaccagctagaaaatctaaaaactgataaattcctggaaacatacaaccctcctagactaaatcaggaagaaatagaaatcatgagcagaccaataacaagcagtgagactgaaacagtaataaaaaaaactgtcaacaaaaaaaagcctaggaccagatgggttcccagacaaattccattagacattcaaaaaattggtaccaatcctactgaaactattccaaaagatagagaaaaagggaatcctccctaaatcattctatgaagacagtatcaccctaatgccaaaagtaggaaaggacataacaaaaaagaaaaatacagaccaatatccccaatgaacatacatgcaaaaatgttcaacacaatactagctaaccaaatccagtagcctatcaaaaaaataatacaccatgttgaagtgggtttcatcccagggatgcagagatggtttaacatatgcaagtcaataaatgtgatacaccacataaacagaattaaaaacaacaatcatatgattatctcaatagatgcagaaaaagcatttgataaaatctagcattgctttatgataaaaaccttcaacaaaataggcatagaagggacttacctcaaagtcatgaaagtcatatatgacaaactcacagccaacatcatagtgaatggggaaaagttgaaagcattcctccaaggactgaaacaaggcaaggatgcccacgtgcaccacttctattcaacacagtattgcaagttctagccagagcaatcaagcaagagaaagaaataatgggcatccaaattagaaaagaggaagtcaaactgtccctgttcactgatgatatgatcgtatacctagaaaatactaagactcatccaaaagacccatagatctgataaacaaatttagtaaagtctcaggtcacaaaatcaatgtacacaaatcaggagcattgctatacaccaacaacgaccaagtgagaatcaaatcaagaactcaatcccttttacaacagctgcaaaaacaaacaacaacaacaacaacaaaaacctccaaaaaaacaacaccccccaaaacctaggaatatacttaaccaaggaggtgaaagatctctgcaaggaaaactaaaaaacactgctgaaagaaatcatagatgacacaaacacatggaaacacatcccatgctcatagatgaatagaatcaatattgtgaaaatgaccatactgcccaaagcaatctatagattcagtgcaattttcatcaaaataccatcatcattcttcacagaactggagcaaacaaccccaaaattcatgtggaaccaaaaaagagcccacgtatccaaagcaatactaagcaaaaataacaaatctggaagcgacccattaacagacttcaagttacactacgaggctatcgttaccaaaacagcatcatactggtataaaataggcacttcagctgggcacggtggctcacgcctgtaatcccagcacttcgggaggtagaggcagacaaatcacctgaggtcaagagttcgagactagcctagccaacatgataaaacaccatctctactaaaaatacaaaaaaaattatctgggcgtggtggtgggcacctgtaatcccagctatttaggaggctgaggcaggagaatcacttgaacctgggaggcagaggttgcaatgagctgagatcgtgccattgcaatccagtctgggcaacaagagtgaaactccatctcaaaataagataaaataaaaaataggcgcttagaccaatggaatggaatagacaatccagaaataaagccagatgccaacagctaactgatctttgacaaagcatacaaaaacataaattgggaaaagcacatcctattcaatagagagtgctgggaaaactggcaagccacatatagaatgaaactgtatctccatctctcactttatataaatgtcaactcaaaatggatcaaagacttaaacctaaaacctaaaacctaaaaccataaaaatcttagaagataacatgataacattaaaaaactcttctggacattggcttaggcaaaaaattcatgactaagaccccgaaaacaaacacaacaaaaataaaaataaataaatgagacctggttgaatgataaagcttctacacagcaaaagaaataatcagcagagtaaacagacaacccacacagtaggggaaaatattcacagactatacatccaacaaaggactaatatccagaatctacaaggaacgcaaagaaatcagcaagaaaaaaacaaataatcccatcaaaaactgggcaaaggacatgaattgacagttctcaaaagaagatatacaaatagccaacaatcatgaaaaattgctcaaggtaactaatcatcagggaaatgcaaattataagtacaagataccaccttactcctgcaaaaattgccataattaaaaaatttttaaaaaccacagtagatgtttgtgtggatgtggtgaaaagggaacacttttgcactgctggtgggaatgtagattagtaaaaccactttggaaagcagtatggacattatttaaagaactgcaagtagatctaccattcaatccagcaatcccactgctggatatctacccaaaggaagtcattatatgaaaacgacacatgcacgtgcatgtttacagcagcacacttcacgattgcaatgacatgaaaacaaagtaagtgtccatcgaccaacaagtggacaaagaaaatgtggtatatgtacaccatggagtattacttagccataacaaggaacaaaataatgtgttttgcaacaacctagatggagatggaggccattattctaagtgaggtaactcaggaatggaaaaccaaatactgtatgttctcacttataagtgggagctaagctaggaggatgcaaagacatatagagcgatataatggactttggggactcaagggacaggctgagaggggagtgagataaaagactacatattgggtacagtgtatattgcttgggtgacaggtgcactaaagtctcagaattcaccactaaagaactcatccattaaaccaaaacccacctgtaccccaaaaaactattgaaataaaataaaacttcatagggcaaacaacaacaaaaacaacaacaacaaagaaaataaataaatcatacaaaaaatatttaagatctctgaaatccaagacactagaaatcaagagacactgtggaaagagtacatagaagacctaaataaatagatcccctgttcatggggagcaagatttaacattgttaaaatgcaacactccccaaattaacccagagatttaaaaaaaaactaacaaaattctaggaggctttttgatagaaatttatgagctgatttacaaatttatatgaaaacataaaaggtctagaataactcatgcaatttattttttaaaaattttagagaaagagtctttctatattaccccatgttggcttctaacttctgggctcaagggatccatccacctcagccccccggtagctgagactacagtcatgcactaccatgtgcagctaatttttcattttttttcaggacaagttttgctatgttgtccgggttagtcttgaactcctgggctcaaggtgtcctcccatctcagtctcttgagtagctgagactacaggcatgttatcatagtcagtacaatttaagtaatttctaaaaagatgaacaaagttataggagttattttgactaaaaaagctgagataatttattatgttaataaatattcttgtacaattacacctattaattacttttaaaatttctgcttcacatctctgcaaccttgggcttagtggatttcccaggaaagaaatgcttccaccaaataagaacctcagctggccattttatatttccataaaatatagtggtatgagggttctaatttctgcttatctttcctaacatttattttcattttaaaaaaattattattatagccatattattgtggtttaatttgcatttctttaatggctaatgatgttgagtatcttttcctgtgtatattggcggtttatgtatcttctttgaagaaatgacttttcaatttctttgcccattttgtaatgggattatttgtcattttgttattgatgtttaaagggttctttgtgtatccaaacacttgacccatatgagatatgtaataggcaaatattttctgccattgtatggattgccttttcactgtattgatagtgttctctgatgcataaaagttttggtttgatgaagttcaatttatctattcgactctataaccatacccagggcaggatcaggaaaacaaggacaggagacgtgcaggggctggaccaccttccctcttgggtgactggaggtctgtcctcagcagtctttcccttctgacctatgacttctgggaatcgggtccccatctctagaatcatcaaggtgatgactggtcctttattttcacaagtgctttacgttacagaaatttcagcaagcagggactatgactgggtaagcatgagtgtttgtgttttgtgtgtgtgtgtctgtgtgtgtggtggggggcggggtatgtggggtacattttattatcaatgcagaatggaacatgacaatgcagatcccagtccttacataccagagctcttcttccgcttcatcgcaagtgtagccaccacagctcaagtaaccacatctccaatgaaatttgatagtgcataccagagtatcttagtttttaatctccctaaaagtataccatgtcactcatagattgaatatatcaaagttgtcttcatatggaagccatgaatttgtctatatgggtctcagacatatcattgaaatatagcatgcccaagaaagtttaattaatgtgtatttgaacaactacagtgtatagacatcaaccaaaatatgaattatcagttcatagtatcaagtcttcataaatgcacatcactgttgccaatccatgtctatatttcactggaaatctggcataatattttctttactttggtgaatgtaagaaggcaaataagtcttgagtactcatcctaagttgtatttattggataccacatatattaagtaccctacagacccagtagacacatttcaaaaattataaaataattaaaccttacaatcccatcgcattagtaatctttacttttccacaacttgaaacaattctatgtccttcaactctcggacccctttcctcatcgtctcttcctaggtcaaatatgtatgaagttttcacaactctggagtgcagatgttctaagcatgaccaaaatgtgaaaagtgatgaagaatgatgataatcattttgactacttacaaattaaaaaaaatctctttggcatccacaaacacagaaatgtacaaacactttcccataatcaacctcaaagacatgtaaacagttgatggacaaaatagtaacaatgtgttaatacccttcagcccaaggccacctggagcacatctgtgggtgaagaagttgggtttattactcactgcagtgggagggagaatgcacaccttggataactaccgagtatcttggtaagtgccttttagatagagcctattataatatttgggcttcagctggtatttcaagtttccctgggatttaattaattagtagttatgactgaatgatgacacagagaggtctatgccactgaaaaaagagtttattacccactgacataggaagcacagcacaacaggcagcaccaaggctggtcaagtggcaacgggaggggaaagcatgggcgagagcctctaatgtggtttttaggggaatgaatgagcaaggcagggtaagcagtgtagacatgttcagtattgatgagtctgaataatcttggtgactctgaggcatagggattgtctctagttgtctgatacctgtctctcagattattaagacaggagaatattgactgggagtatcggggccatgtgacagccagaaaaaaagaactcattctgagtttgggctctggtttggttagtttgcataagaaaggcgcatttgcggtcaatccctttagtatctgtaggaatagactagtcttgggaggggagtcctcacaatcagtgaggactcagatgccagagcatgagaataaggaaaaaaagaaaatacagataacacagttgagaaattctattttattttattgctctagattgagtactgtcagtaagcagaggcaattctacaattcggtatttcaataaatcttacctttagggagggtggactagagtgcagataaagctcaatccgtagagaagcatcagccactcatactagccgggagagggtttagacaaaattatgaagtacttttgtttcgcctcactttctcatgggctgagagtgatccagtgtggtgttggtattttgtgatataatttatgtcccagagggactaatatggcccagtagtgaagaccagaccagctcctggcaacattgatgcccagctgtgccagacaagttcccagatattaggggctgctttttcttgattaaattcaatatttaaaaatatcagcattacgtttgagaaatgattaagaaatgtcatatagttatattagtaataaatatgtgcaaaaaataagaatgtagactacaaaatgggaaccagaattaaaatccatcagcttggcaaagacagaagtaaatgatggtagtattgatcagagtacagggaaaatgtactgttacgaagactgatggcattgaaaagtggtacaaaacttctaaagggcacttttgcaaaatgtctcaataatttaaatgttctgacgtttttgagacagagtcttgctctgtcgcccaggctggagtgcagtggcacaatcttgacttattgaagcctccacctcctgggttcaagcgattctcctgcctcagcctcccgcgtagctgggactacaggtgcgtgccaccacgcccagctaatttttgtaattttagtagaaatggggtttcaccatgatggccaggctcatctcaaatccttgacctcaagtgatccacccgccttggtctcccaaagtgctgggattacaggggtgagggattgcgccgggcctaagtgttctgacattttgacatgaaaatttctcttttaggaatttatcccaaggaaataattacatatctttctaaaaacgcatatataggccgggcgcggtggctcatgcctgtaatcccagcactttgggaggccgaggcaggtggattacgaggtcaggagttcaagatcagcctggccaacatggtgaaaccccgtctctactaaaaactacaaaaattagccgagcgtggtggcagacacctgtggttccggctactcgggaggctgaggcagaagaattgcttgaacccgggaggtggaggttgcagtgagctgcgatcatgtcactgcacttcagcctgggtgacaggtcgagactctgtcccaaaacaaaaacaaaaaaaccacatatataagaatgttccttgaattgtggtttataaaagcaaaataatggaaataacccaaagattgtaatgaatatagtgatgatagttatcaataatggagcatttagtatgactcagaaaataatgccatggctttacatagagagtcagatttaatcctcaatgcaaacccatggggaactcaatatgtgatcctttgtacagacagggaaggagagaggtaaagaaggtggtggggctagggttgaaccctggagattttctctcagaggccttgttgacttgtcttccattgattctctcttcatctgcaccttacacaagtgaactgttttgatgtcccagaatgttctatggacaggaggccactggctcagagctcaggaagacaagaagggcaatgacttaactgccaaattcacgcagaagtccgttcatccagggtgtatttccagtgatcaggagatctgctaagcacttgaggatataatgaagagcaagagtaaagtcttggagatggggagttttcaatattgtaaggaagataaatatttagcaaaaattgccccaagattgtgaaattgctaatgagcgtaagggaaaagtttgtgatatcatgaaagcaggttacaaggagacctaatgggtccctaccactattaccaattatgtgtgaaagatgtaagaaaacaacagttatgagatttgaacaaatttataaacaatttcatgcagagaactagaaagagctctggaattttaaaatatgatcattgaaataaagagtttaaaaaatgaactgaaatgaaagttgtgtgctgcaaggtagtacaaaataaaaacgtgatgccaagcatgatagaactttaagaatattatactatcaattaaggaattccagcagtctcataatataagttccaataaccatagaaagtaattaaaagtaattcaagaaaatgttttgaaggctactgacaaaaatgtatagtgtgaatggctgcaacaaagttctcaatacaggagatggaaacagacccacaccaagactcatgacaacaaaatttcagagagtgaaagacagagcaagaccaatggacaaaggaatggcaggaggtctggtcgtgtgtgtgcatttcctccttcccgtctgtcattgtccttcctcaccaggcctgcagatcacctgtgatgacttggcctcttgccatccctagctgggcaaactccatcatggtgacacacgggatggcagaagtgcaaggcctcgtttctgctggatgagccttctggagactgtctcagggttttctgagaacttctttaaaacctggtctacgggcatgcattaccccagttattttttccctaagtgaaaaatcaaccagaggagatgatttattttaatagccttattgcaggagaggaaggtgaaaagtgtttctattcattggcccattagttacaatgggcagaggccactgagcgagcagcgggtggtggcagtgatgaccacacgttctcacggcagcgcaacacttttgagacaagttcccacctctccattaaacatgtcttctccacgtgcagaaaatgtggtctcgtagcttcccttctcagtgctggattgctggcatttcattttccttatcagagacatgaatatctttgttcttcttggatttctaagacttcaggttttcttcagggagaagctgcttagggaggctcctgcgtggaccgagtccttcctgagggtttgcttggtgccctaactgtggctgactgcctcccgcggggtcccaactttatacccagaggtaaggacagatgcttccagctccatcttataacttccacatgaaatttgaggtcaggaacttctcttaactcgtcttaaagggcctcatacttacattcttgactcggaaaataattaagtgtgcgtttgaacatgtttcctccgcaatttactctctggaggggaatacattgaaaacccagtttattttcagatactgagtgggattgaaaagctgaattgtttgttttcctgcagggcacacagaggaactggctatcccacaccactctgacatttccagagaagcaccgtcctcttccagtaggacatgagtaagaccagtgaggagccaacatgcagcccctgggcatctctggggttgaaggaaagatatatatgtccttctgatgtgtggagccctgagggcagtgttcaagaccctgcattttccgaagtacttgtttactgagcaagtgtttctgcttgttgcattatgtcaggggatatggaagccacttttcatccagccaaacacagatgcaaatgagatgttctgggagaaagcagaaaaagcccttttcacagagttccttattttactattctattacacttgtctgaggttacaatcacatccttttttaacaatctctcaatgagaaaatcatcaaaagggtatgtagtgagtgacagacacaggataaatgctgtaagtcagtgtttgatgaaagatactggtgttccaggatgtcagagtctcctgggtgccagtagggaggtggtcagggactttatccaagaagcagaaagaagagcttcagggacatgaggatgtctcatagccaaggacaggacagtaaagggccccgtgtgagtgcatcacagaggtctgttactgttcagaccccaaagctcagcacccagtgtggcatgtggcaagacctcagcaaacacatcagttggctggatgaaggagggcaggtgtgagccgacaaggaaaatcttgtgatttttgttgggaaatgaatgtaaaagtgttgatgtacctcccttgtaaggagatagaaaggtagagagcagacagatgcatgcatggatgaatgcatggatggatggatggttggatggacggatggatgttcattttctgtgtgtgtttctatctctgttctgcctttctgttttgtctctggctctgtctgtatctgccattgtcccttcacaaccatgccttcactattatcagtaacatcttttacctggtcttataggatcttgcctgtgttgtattagtggtcaaggacagaaaaaagaaagaagtctgtggaaaacaaaataaaggaaacagatgcttctgacatgcggcagtggaaggatgtgtggacctgaggcccccagggagacaggggctgcgcctcactgcaaagtcgatcctgctgaacacagaggggaaacgcgctcagacagccctgcccgtgctgatcagaagggagggttgcgcctccagatccttctccctgtgtttcttcagggcccagccctgagagttccagggtcccattttcttagttaggaccttaagaccctatcagagtccagccccaggaagcctgcagtcatagcactgggctagaccaagttgctgctatgaaaagggatttgaaaattcccagaggagcctttcagcctctttccatggctctttatgccctttcaaaggcacagccagagacatcagaaatgaaattgtatataattatatggacttttcgacaatcattgaaatttctgtaagtgccagttacattttggcaaccccatcaaagccaggtgtgcccagggcagtcagctcaggccctggcctctcattcaggttggattctataagaaccgcattcgcggtgagaattctagagccagatcttgctgctccacaattgcctcacgttgcaagacaagcaaatctagcctgagtctgtggattccagggctgcttaggaggaacctccattcccgcgtggatgacctcaggctccgccccttctgccccactcagccctcacccagtgcctgagagcgctcaatcagaatgcgagagcagcgcggcggcgcccccgtgtggccacagggacgaggacagaggaccggaccccgctcccctttctcaccaaccaggacctccgaggctctccctctgctcccagcacctggacagggctctgcactcaaggagcctccgggtctcaagtcaggctctgagtccattcagcttcccaaaatccatgttgacaatgacatttcctctcaccactgagtgactggacttttgcctcagagcagagagaggcctccagggcaaaacagtgggatcagatgtggggatgacacacccccaaatccttgctgccacaggacccagtccctcagcctccagatggggccttggcctcccgtcccctcctttgttcctgctgctagaggctgctcatctcaggaatcagcctgttagcctccaaccctggggtccagggacagcagctcctagtgcctcggtccaggaagaagggaacctccagagagcagaagagagaagaaatggatcataagagaagggggcaaggggggagaaagagagtgaaaggagccagggaggagagaaaaatggaaaacatcctgttaggaatgtgtgtgtttgtgttgatgtgtgtgcgtgcaggtgtgtgtagagtgggagagagtttctagggttctgaggagaagagagctgctatacaggtgctaaggggcccagccctgggaatttcagggtcccgctttctgagctaggatcttaaggccctatcagagtccacccccaggaagcctgcagtcatagcactgggctagctggacggctgcctcttctttgcctttgacagcaggagctgccatgccaggcccaggggccctggggtcatgggcagagagcaggtccctctgctggcagccaaggagatgttgttcttggagggtcaaagacttacttagctgggagtctgaaggtggtcatgggttacaaaggggttacaaagagctcagcggtgagcctggcccaagcttctgacccctttctttggatctcaagggctgaccatggattctcaatggatctcaagaattcgcccatttacctcttgccccagaccctccccacttcgataccctgggacccaggcatctgcctctttccttctcctccggcctcccaagcacctccaggccctgctctctgccaacctgaactccaggaccctgcagccccaccccaaaattgcttgataatacagtgattctattttcagtgttttgaaaactctctatactgttttttacagttgctgcactagttttacacactgtgtgtaagagtgcccttttctccacatcctcacaaacatctatttgtttgtttgtttttttttgtctttttagttgtacccattctatctgggggtaagatgatatctcattgtggttttgacttgcatttccctgatgataagtgatgttgagcatttttcatgtacctgctggccatttgtatgtcttcttttgagaaatgtctattcatgtcgtttgtccactttttaatagaattttttggtttttttagctcttgagttccttacatattctggatattagtcccttgtcagataaattgtttgaaaatattttctcccattcaacaggttgtctgtctactcttttgatggttttctttgctgcgcagaagcgttttagtttattatagtcccatttgtctattttgtttgggttgtctgtgcttctgaagtcttagccataaaatcgttacccagaccaatgtcctagaatgtttctcatatgtttgcttccagttgttttatagttttgggtcttacgtctaagtatttaatccatcttgagttgatatttatatagggtgagatatagggatctaattccattcttctgcatgtggatatccaatttccccagcaccatttattgaagagggtgtcctttccccaaatgtatgttcttggcacctttgtcaagaatcagttggctgtaaatatatggatttatttccagattctctattatgctgcattgattgacatgtgtttgtagagacgaggtctcagtatgtttcccaggctggtctagaacctctgggctcaagtggttcaccctccttggcctcccaaagtgctgggattacaggagtgagccacagtacctggcctttgtgctgtgttttgattcaccgttatctcctaagccctttcccagcattgatattttactaaacaccctatgattaaattatatctctacaccttgagataaacaaaaaattatataagcggtaaagacaaatatgaaaaaataaaactactaccaatgttattaggaggataaccttaaaacatttgagcaagaaaatttttctttttttcttttttctttttttttagctgtacctgctggaatggaaaatatttcttaaatgagacaaatatatgaaagtgaaaatgcttaaacttcaaaggacttacattacatatatagtcattctttcttaatgataagataggttctgagaaatgtgtccttaggtgatttggtcttacgtgaacatcataaagtgtccatacacaaagctagatgatatagcctactgcacacctacgctatatcataaagcttattgctcctaggctacaaacttggatagcacattactatactgagtactgtaggcaattgtaacacaatggtaggtatttgtggatctaaacatatgtaaacagaaaaagtacagtaaaaatatggtaaaaagatttttacaatggcacacctatataggttactcatcatgaatggagcttacaggactggaagttgctctgggtgagtcagcaagtgagtggtgagtgaactgaaggcctaggccattactgtgcactactgtagattttataaatgctgtacacttaggctacaataaattgattttaaaaataattttctttctttaataataaattaaccttagcttaatgtaacttttttaactttataaactttaatttttaaaacttttcagcttttgtaatagcacttagcttaaaagaccaacatgttacaaagctgtacaaaaatattgttccttatattttcattctagaaacttatttctatttaattttttttttacttttaaatcttttctgttaaaaaaaaagacataaattagcctaggctgacacagggttaggatcaacaatatcactatctttagcctttacatcttgtcccactggaagattttcaggtgtaataatatgcatggagctgccatctcctatgataacaatgccttcttctggaatacctcctaaaggacctggccgaggctgtttcaagtttttttaataattagaaggagcacactctaaaataacaataaaaagtatagtaaatatgtaaaccagtaacatagtcatttattatcattatcaaggattatgtattgtacataactgtatgtgctagacttttataggattgacagtgcagtaggtttgtttacaccagcatcaccacaaacatatcattaatgcattgtactatgatgtacagtgtcacctacaatgtcactacagagaagaaacccccaaaatctgcactcctaagctgcatatgctttaggtgatactctaagaagcccaccagagaacagttgcttggagattgcatgctaagtagaaatgccaaaggcttcagagtatgaggagatgttggaattttagcccagccaaacctgggttgagccaacagggtggtgaagcactatgagtgaggacccttgccttggagtaaggaccgcactgaactagactcatgttaacaaaggctaaaatcaagcctaagcagaatcaaagtgggtctgatttttatgataattaatgaaccgtcaagcagttagcagtcttagcaggaagatagcaaaatccagaacctctgtaacacatcacccagaatatgtggcatgccaagcagcagaaaaaatgcaacaagtggagataaaataatcaacagaagccgactcagatgatctggatactgaagccagcgagcaaggacattcttcaatatatttatgattaatatgttaaggataatagaggaaatcatgggcaaactatttcataatccccagaaagatcaatcatacaaagagagaaaacacgaatgaacactgtgagaagggacaacttataaaaccacagattttattaaaatgaaaataagagaatattagacacaacttcatgacaataccttttaaaatttaggtgcaatgaaatgagttcttgaaaaacacagttgaacaaagccaacagaaaactaagtagaaaatataaatagtcctctatccattaagaaattgaattttaattaaattccttcccaccagaaaaacttcttaccacatttcctcccatcaattctttcaaaaacttaaaaaaggaatgtcagtcctatatagtcatcccttggtatccttttgggctgggttctaggacccctgtggataccaaaatctgtggattctctggtcccatgtataaaatggcctactatatgcctactacctatgcatatcatcccatatactttaaatcatctctagattacttacaatacctagtgcaatgtacatgattgtaaacagtagttatactatattgtttaggaaataacgacaagaaaatgtctgtacatcttcagtacagatgtaaccactgtcagtaggcctaactacagagtacacaacagcagcaacataacatttccaatcctcaggtagttgaattcacagatgtggaacacacagacatggaggacagactgtcttatattttatataatgaagagtggccaggcgcggtggctcatgcctgtaatcccagcactttgggaggccgagatgggcagatcacctgaggtcaggagttcaagaccagcctggccaacatggtgaaacctcatctctactaaaaatacaaaaaaattagctgggcgtgatgacaggtgcctgtaatcccagctactcaagagactaaggcaggagaatcgcttgaacctgataattgctaggctttgagtaaagtagtttgacctttataatgtgaccctccctaaacaagatggaactctgcagcagacatcctgggatttgaactgcaatatcagtcaactgacccacaaagagctggttggtttgtgtacagcatttgcaagatgagtggacaacatcctgtttggaagtctacccctttgatcaaagaagttaaaaacaggacagtttttttttttttttttttggttgaattgcatgatgttttctgagaagtgatgaaagaattgaacaatgacaaaagtccctatgtcttagtttttactgacttatgggcattgactgatggcctggccatataattaagagagcaatggaaaactggcctatgaaaagaatacccgtataggacacagtcctgtggaaatcactatggtaatttgaggggtgcattaatgtaaggcgtgttgatgtctgatataaattgggtgttgtccccacccaaatctcatgttgagatataatccccagtgttggaggtgaggcctcaagggaggtgattgcatcatgggggtggcttctcatgaatcgtttagtaccattccctcagaatagttcaattagttcaatgcccctcagaataaccctcctccaggtttggaaggtgattgaaatcaacaagcatttatttctaagtgatttccaggtgtacctgtatttccagctacaagaagaactgaggcagaaggatctcttgagcccaggagtcttagttttgcctgagcaacttttgagtccagggaaaaatatcaataccacatctcaaaaaaatccacgtttgcttgtggtgatcacctgggtccgtgaaataagtagacactgagggctgcagcaatgcagagataggctgaatcaagatatattccttttacatcctccaactcacaggcacgaaatacccataaggactgttctgtttaagaagagacagagacagcatatggctatgtagcaaattctctcatgggaaggtcttgaaaatagatagctggcaaattagactgataccagtacccctaggaggcagcaaatgggtcttggcaggaatagatactgaccctggagtaagcattgcttagctggtggtagatgtgttatcaaactgaactggggcccactcacctggtgcaataaaggcaaacatccacactgagattttgtagtgggagaaaggaaggcgtttatttgcaaggcaccaagcaaggagaatcgggcagctcacacttaagacctaacctccccaatggcttacaagcaagagtttttaaggcaggagtaaatttcagcaaagccgagttgcaggcaacatcaaaaatcaatgcatagaaattacacactggtttggcctaaaaaggtgggatatcctgatgagggatcgtacaggtcataggtggattgaaagattctctgatttgtgattggataaggagccaaagctttgtctacacacttaggggcagtagggaggaatgttcaggtctgctctgtggacctgactctttccaggcccctcaggaaaaaatttagaacaaagagtcacagtcagcattgagtcctcattttccccttatctgaggtctccctatcagtggctctgtttggtgagagtctgggttcctgaaaaactactcaaggacatatgttaagatgttctctttagtttctatagagaatcaaacatcttgggactctaacttccttggctattgtttaagctatttttacctgcttgcttataaggtcactcacttgcttttcagggctggctaggtgcctggaatttctcttgaaggaactcaacattttcctttatttccatgttagggaggtctagcaggcttctaagataaatccgtacttcatctcagatgcaaatgcttagagcactataatagaacctggacgggagatattgcaaccatttgcatcactgagtcacatttcttcacaccaggaaacacatttgcccaaaatgtccaacaatgttcagaaaaatattttgctcagaggaatagtttcatagagaataaaaatagtcaaatgacacattacttgtataaagcaggagtggggagacataagcatgaagggcgggcttacacacgttcatgagtgggctcacaccagacatgagtgtggaaaaaggagtgtccccactagagagtatcctcttttttcctgctggatcagggaaaggtgctagtatgacctgacatacgatttttcccatgacaagaggacactggaatgatgactagacttcacctcaactcgcctttctcatacctgattcagtggtcttaggacaagggatgcatataaaagtgccaaaacaggaattattcctaagcaagaaagtgtaaatatattttaaaaccattatgcaagaattcctcagggcctggaggagtaggttgtgccttcactgcatctggcaaagttggggctaacactgaatgcagctatattgcctggggtcagatagccaactagttctctacctgcataaccctaccctctatgaactggaatggaccaacgagagacacttgctagaacagtattgctcccttcagtctaggccagcacagtagcagaacttaatgtttcttccaaaactgttaatgtttggtataaatgaagtagaaggaggaatagtagctgagggtaaatgaatgaataaatgggttgtgtaatgaggaaaatccaatgttacatgaactcccaaaaaaaagaggtataagcaagagatgatattgtctcttgacaatgatggtgcaccccgtctccatggggacagagggtcgtgtgctcagagtgcttccagatgtcgcctcctgcacttcatctgcctgctcatttttatcctttacaactgctattgtttgaatgtttccccagaaaagcgtctgttggaaacttaatccccagtgcaacaatgttaagagatgggacctttgagaggtgattggaccatcagagctctgccttcattaatgaactgatcaaggctgccctcattaatgctgatcataaaggacctgagcctgtgagttcgacctcttactccctctagctctcaccctctcttgcgcttctcccttctgccagatacattcccttgattttggaattcccatcctcgacaaccatgagccaattaaatttgtgttcattgtaagttatccagtctcaggtgttctgttatagtggcataatttaaaccaggggtccctaactcccctgcagtggaccggtacaggtttgtggcctgttgggaaccagaccgcacagcaggaggtgaagggtgggcgagaaagcatgagcatgaccgcctgagctccgcctctggtcagatcagtggtggcattagattctcatgggagcacgaaccctattgtaaactgtgcatgcgagggatttaggctgcacgctcctttataagactccagtgcctgatcatctgaggtggaacagtttcatcccgaaacccatccccgcctacctgtgccgcctgccctggtcagtggaaaagttttattccatgaaaccagtacttggtgccaaatatgttgaggtaagctatgattaccgctgatttaagctatgacaataataaactgcaatactgagtgtgaaagaaagataaaatcttgggaccccaaactcacagtgccaaagggaaaagttaagtttgggaactgagtcatggaaaaactgcctttcttttgttcctaaacaaatacctgcaaagatagaggaccacatatctccccaagtggcctccctcacaatctgctcacaatgtaattccttgtgggccccaacatctttaccctaaaacagagttttgttgacttttcccctgacaatgtaaagtaacagcttatcttcacaggtacaggacaaagacaagactagaaatcatcccttcacccacccggagacaaacacatattttactactctatgtttactttagcttatgtaaaattcagatttactgagcacaagatgaatgcatagttgactgtttttccccttctgcctgctctttcccctgtaagtactgaagtcctcaaaacccttttaggaaaaagcgtgggccacagatgctagtgatttttgtctctttttccaaggtgcatcttggaatgggagactggagggacccatggatcccaaccctggacctggttcccccagtacaatccatgagccagttgaatctgaatgcgaagatggaacgacgactgaccagagtcatgctgacatcaacccccataacatggggactgatcaagaaaaccacacaggaagctgagaaactgctggagtgccagggtgtcaccttttgctggaactcagaagtacaatcgatgtttaacggaccagtgctttctgactcagctcctctctaccctgaatacaagagaccctaatagttaggcaggaatatcatcgcccttattctgcatgaagaagttgcagaagacagaccttcatccttctgcaacccttaggattaagcgtcctcttgtaaaaagggaagggggagatatgtaagaagcattcaaaccacagcaactctattttgaataagggctaagaaaaatgaagctggatcaccaaccggcaattaagagctgcacagcctgcaattaccttgctcaattaattttaaaacaaaaaggagtagatgttggaggccgcacgaatgtttcttatgatttgccacaattgaagcctgccagtaacaatatgaacctgtgatcaattaagcagctgaccaatcattacctcctcctccttgcccttattacccagtaaatatgaagggctaagaagctcgggcggcggcctttgctcactagaagcagggagctcttttcttctcgtctctcttcttcttccccatgctagcctttccttaaaatgatgtagggtatctggcagataaaatttctaagcagcaaagcattcaaagagtgacttgggtgctcctaaaagcattccattttcaaagggaaacagagcataaaagttcagaaaatttacagcctgacaatgcagtagaaaagaaaaacccattttttgaggagaaactcaagctggctgcagaaatttgcataagtaacaacaagccaagtgttgatccccaagacaagggggaaaatgtctccagggcatgccataggtcttcatggcagcccctctcatcacagacccagaagcataggaggaaaaaatggtttcatgggcagggcccagggtccccatgctatgtacagcctagggacttggtgccctgcatcccagatgctcccactgttgctaaaaggggccaaggtacagcttggtctatggctccagagggtgcaagctttaagccttgacagcttccatgtggttttgagcctgcaggtgcacagaagtcaagaatggaggtttgggaacctccacctagatttcagaagatgtatggaaatgctaggatgcccaggcaaaagtttgctgcaggggcagggccctcatggagaacctctgctagggcaatgtggaagggaaacgtggggctggagcccccacacagagtccctactggggcactgcctagtggagctgtaagaagagggccaccgtgttccagaccccaaaatggtagatccaccaacagtttgcactgtgcatctggaaaagtcacagacactcagcgccagactgtgaaagcagccaggagggaacatataccctgcaaagccacaggggcagagctgcccaagatatggggacctacctcttgcatcagcatgacctggatgtgagacatggagtcaaaggaaatcatcttggggctttagaatttgactgccccactggatttaggacttgcatgggccctgtaactcctttgttttggccaatttctcccatttggaatggctgtatttacccaatacctgtacccccattgtatctcgtaagtaactagcttggttttgattttacaggttaataggtgggagggacttgccttgtctcagatgagactttggactgtggatttctgggttaatgctgaaatgaggaaagactttgggggattgttgggaaggcatgattggttttgaaatgtgaggacatgagatttggaggggccaggggtggaatgatatggtttggctctgtgtccccacccaaatctcatcttgaattatactcccataattcttacatgttgtaggagggacccagtgggagataatatgaatcatggaggcagtttcccccatactgttcttgtggtattgaataaggctcacaagacctgacgattttatcaggggtttccgcttttgtatcttactcattttctcttgccactgctacgtaaaaaaaaattcacctcctgccatgattctgagaccatcgagccatgtggaattgtaagtccaattaaacttctttttcttcccagtcttgagtatgtgtttatcagcagtgtgaaaacggactaatatagctggcttcgtagactgaattgaaaaaaactgcctactttaatttctaaaaggtatgtgtaaaattgatgtaatttctaaattatatgtttgatacaattcatcagtgaagccttctggacctagactttcctatattagaaggattttgattacaaattcaatttctacaatcaatatatggctgaccacattttctatctcttctcaggtcagttttcataagttttccctctcaaggaaattgttcatttcatttgcttgtcaaacttattgacatgagattatcaatatttctttttgagatctagagtgtgtactgatgttctctcttttattgctgaccttgttaatgtgtatgtttttgtcttgatcagtctggctagaaatttataaggtgtacgatttttccctatagaaccaatatttggattcattaattttctctttctgcttcagttttttattttattattatttccttccttctgcatgcattggtttaatttgttcttctttgcttcttacaggagaaactaatttactaatttgagacctaccttctttcttaatataggcatttaaggatatcagttttttcttcagtactgcttgttgggaacaaatgctcagtgttgtaaagaaagatcagcactgagacaaaggatctctcagcaaggcaattgacttctgcagaaagggtgctacttatgatggaacgatggcaagtgcacacctgaacaaaggagagcaggggttttttataatctcttaatgcagcttgtccctgtaactgtgtcttgtctccattggctggagctggactgcacaatctaagctgaacctggctggctaacttgaaaagtgcaggaatgtggttataccaacagagagtgcagtcttggcgggaggagctgttgcaacaggagggttaatctatagagtgggtagcagatgtgggatgtggtctccatagataaggactggcgggaaatttgtttaccagggcaggggatacagagcgtaaggaagtctggccttgaaagcagggaacaaagagccaggatgctgagcaagttaacccttaaagaggaactctttttatatctaacactacttcaactgcatcccatacatttgatatgttgtgcttcagtattcttcagaaaacagaagactttctaatttctcctgtgatttcctctttgaataagttgttattcagaattttgatgtttaatttccaatccttggtattttcatgatcgtccgtcttagtcaatctgggcagttataaaagaattccatagtctatgtggcttgcatacaacagaaatctatttctcacagttccggaggctgggaagtcaaagatcaaggcctgggaaaagtcagtgtatggtgagggctgcttcctgattcatggatgttgccttttcttggtgtccccacgtggtggaaggagcaagcaatctggggtcccttttataagggcattcattttattaatgagggttttgccttcactgcatgatcactttctaatggcacaacctccaaacaccatcacattagagattaggtttcaattatgagtttaaggatgacaaaagcattcagtcccacaagatcatcttattgttacagatttctaatgtatttccattatggccagaaaatatattctgtatgatttcaatgtcttcaaatttattgttttatggcctgaaatatggtttctcctggtaaatgtatcattcatacttcagataatttgtgtttttcattgatgtgcatatgcatataaataaattaagtctgggtgcttgataatgcttttcaattttctatgtctttgctaaatttttcttagtttttgtatttatagctgaaagaaagctttaaaatgtctaaccatgtttgtagaattctctacttctctctgtaattttgtcaatttttcttcatgaactctgaagatttgctattggatccatttctggttgcatgtctttctgttgattttacccttttgttattatgaagcgcctctttttctctctggtaatacatattatttgaaaatcttttactggtagtaaaataaccatttcaatcctctgtgcttaatgtttgtatggcattgcttttttcatcaatttttatttatctgtgccttcatattgaaattgcatgttttgcatgcagatgtatgttcattgcagcacttgtcacaatagaaaagacatggaatcaacctaaatgcccatcaatggtgaactggataaagaaaatgtggcacatatgcaccatggaacattatgcagccataaaaaagaacgagatcatgtactttgcaggaacatggatggagctagaggccattatcctttgctaactaatgcagaaaaagaaaaccaattgccacatgttctcacttgtgagtgggagctaaatgatgagaacatatggacatatagaagggaacaacacacaccggggcctacttgaaggcaacgggtggaaggagggagaggatcaagaaaaataatgaatgggtgctaggcttaatacctgggtgggtactaataggtacagaaactatatgactgtgggcagcaagccacccaggtgccgaggcaagagactgaaggcacaagctcttccagtataataaagaaaatacttaaaataaaaatagttgtattagacataaaatatagatatggttatgtataaatattactaatcattagtttatgacattactctttattccaatattataataatctttgttctacaattataacctagaaaaaaccaggccatacagagataggagctgaagggacacggtgagaagtgaacagaagacaagagtgtgagccctctgtcatgcctggacagggccactagagggctccttggtctggcggtaacgccagtgcctgagaaggcacccatcactcagcagatcgggaaagggagtctccctttgcccgggggagttagagaagcctctgctccaccacctcttgtggaaggcccgacatcagtcaagcccgcccacagccatctggaggcctaaacgtctccctgtgatgctgtgcttcagtggtcacgctcctgtttgactctcatgttccaccctctacacctggctcagccttctaaatagcagtagcaaaaattagtgaaagtactaaagtctttgaaatacatagaagaaataatgacataaactgtcccctctctctctccgcctcggctaccgaacagggaagggccccctgtctggtggacacgtgactcacgtgaccttacctatcattggagatggctcacactccttaccctgcccccttgtcttgtatccaataaataacagcgcagcctggcattcgaggccactatcagtctccgtgccttggtggtagtggtcccctgggcccaactctcttttcttctctttgtcttgtgtctttatttctacactctctcatctccacacacaaagagaaaaacccacaggtcctgtagggctggagcctacatatgacaaactctcatgatacaaatttacctatacaaaaacctgcacatgtaccctgaactaaaaataaaagttaaattaaaaaaaataaagttcatgtcttgaaaagagcatatggttgggttattttttttaatccagtcacagaatctctgcccttaattggagtgctgatttatgtaggtttttgtcattattgatatgataggttttaggtttgtcatgttatttgctcagtttttctttctctgtttctcttttcctgaccaatgatttctcatcagaaaccagagaaacaaaataaactagaataacatctttaaagttctggaagaaataaaaggtcaactaagaattctatatccagtacagatgtccttcaagataaatgcaaaataaggagatatttcaggtaaaagataattaagagaatttgtcaccagcagatctgtacgataaaaattggtaaagaaagtgtctcaggctaaaagcaaatgataccaggtggaaaatgagattatcagaaaagatgaagaatgtgagaagtggtaaatattaagtgcgaaaggctatcttgctcccccacccccatttaatcttacttcatatacatagaactgtttaaaggtaaaataagatagctttctgatggggcttataacctatgtaaatatattacatataatatctatggcataaaagatggacgttttatagaggataaatggttgcaagatttctatatttatgtgaactagtacattattaactgaaagtgggctgtgaaatgttaagaatgagttaagttctgaaggaaatcaagacacaaaaaaattcaatagatcaacaaattcaggagatgatttttgaaaaagttaataggatagataggctgatagctagactaataaggaagaaaagagaggcgatcccaataagcataattagaaatgacaaaacagatgttaccactgactctgcagaagtaaaaataaccatcaaaagctactatgaacacctgtatgcacacaaactagaaaacctacaagagatcgataaattcttggaaacatacaccctcccaggaagaaattgattccttgaaaggaccaataatgagctccaaaattaaatctgtaataaatagcctactaaccaaaaaaagccctgaacctgatggattcacagctgaattctaccagatggacgaagaagagctggtaccattcctactgaaactattccaaaaaattgtaaaggaggaactcctccccaactcattctatgaggccagcatcatcctgataccaaaacctggcagagacaaaacaaaaaaagaaaacttcaggtcaatatgtttgatgaacattgatgtaataatcctcaacaaggtacttgcaaaccaaatccagcagtccatcaaaaagctaatctcaatgatcaagtaggcttcatatccaggatgcaagattggttcaacacgtgcaaatcaataaatgtgattcatcacatacatagaactaaagacagaaaccacatgattatcttaatagatccagaaaaaccttttgataaaattcaacattcctttatgttaaaaacgctcaataaactaggtattgcaggaacatacctcaaaataataagagccatctatgacaaacaaacagccaacatcataccaaatgggggaagcattccccttgaaacccagcacaagacaaagatgccttctctcaccactcctattcaacagagtattggaagtcctggccacagcaataaggcaagagaaagaaataagggcataggggaagtcagactacccctgtttgcagaccattaccagtgaatgttcccttaaggctcacaggctcttatatcagcttgtggtgagtgctgctaactagtctttaatggattaaaatgtataatgtgtttcacttgtgtattagtatgttttcacactgctggtaaagacatacctgagactgggcaatttacaaaagaaagaggtttaacggacttaatggttccacatggctggggaggcctcacaatcacggtggaaggcaaggaggagcaagtcacatcttgtgtggatggcagcaggcaagaagagagagctcgtgcaggaaaattcccatttttttaaaaccattagatctcatgagactcattcgctatcacaagaacagtgcaggaaagacccatccaaaaattcaatcacctcccactaggttcctcccatgacaggtgggaattgtgggagttacaactgaagatgtgatttgggtggggacacagccaaaccatatcaacttgtaaattactacaaaactgtcaacacttagccacttctgcttcctcaggaaggtcggggcagcagatctgtgtgttaaatatctatgtgaagttatttccaggaagaagtttcatctgtggtttcttcttccccaggtcccacagtcttcattacaacctcacggtgctgtcccaggatggatttgtatagtcagggtttctcgctgagggacatctggatggtcagtcgttcctgctctatgacagacagaaaggcagggcaggggccctgtggacagttggcagaagcagtcctgggagctgagacctgggacacagagaccgaggacttgacagagaatgggcaggacctcaggaggaccctgactcatatcaagggccagaaaggaggtgagagtcggcaggggcaagagtaatggcagaggccttctccaggagagttggaggcagagagcagggacctgtctcttcccactggatctggctgagggtgggctgagaaataggggtcagtggggctcagcagggaggtgagccggcactcagcccacacagggaggcatggaggagggccagggaggggtcccagctgggctgagttcctcacttgggtgggaaggtgaggggttcaggaatgaactgctgggtgggggcaggcttgcattccctccaggagattagggtctgtgagatccatgaagacagcagcaccagaggctcccggcatttctactatgatggggagctcttcctctcccaaaacctggagactcaggaatggacagtgccccagtcctccagagctcagaccttagctatgaatatcagaaatttctgggatgaagatgccacacaggccaagacactttcaccctgtgatggcagaccgtctgcagaaactacagtaacatctcgaatcctaggagggcatcaggagaacaggtaccgaccctgggcaggggctttcctctcccccatttcactagagtcactcccctgccagctctgtcctgggaaaccctctctgtgctatggatgcaggcgtttcctgttggcgtattgtgtcctgactttcctctcttgttagagccactggataaagacagtgggttggggactgaaccatccagtgttgtaatctgggaaagcaatggcccactcccaacagaatcctcaccctggggtgggtgttaggcaggagaggaagccctcagggctagggctgccccctctgcctcccagcctgcccatcccagagagttccctcctggcctcatgacccaggagtccaatcctgacatccctccccttcagcatcaatgtggggatctcagagcctgaggccatagtctgaggcccatcctcctgccagcccaaaggaattgggccccagggtaaggacagacttgcaaaagatccggggtccatgagggcttcagccagagtgagaacactggagaggagcagccctgttccctgagtctcccttagagggagcggggcttggccatgtgcctcactggctctgccctttcctatccagtgcctaccatggtgaatgccaggcctcagagaacaaagtcacccccacatgctgggcttctggcttctatccccagaatatctctctggcctggtgtcaggttggggcattttctgagccaggatgcccatcggtctgtgggtgtcctgcccaatgggaatgggacctaccagacctgggtggccactaagattccccaagaagaggagcagagggctacctgctatgtgggacacagcaggaatcacagcacttaccctggtgtcctctggtgagcctggggcgaccctcaagtgttctgacctagaaagggtcaggccaaggtgggcacagcagagataactggaactctgagtgcccagtgtgcaacaaggccctttttttcagggaaagccctgatgcttcagagtctatggcaaccgttccgtatgttgcggctgctgctgtttttgttatcattattattattctctgtgtcctttggtgcaagaagaaaatatcagctgcagaggacccaggtgaaaaaagggggcagtggctggagatgggagggaccctgtctgggcagtagggtcccctcatagctcctgcacagacaggcatgtaggtgacaaggctttggaacagggtttggaagttggggtatttgggaggggaataggagctacaatttcatctagacccctaagtcctgcccaagccagggccgggccaaagccctcgaatgtccatctgtggcctcctcttgctgcaggtgaggagtgggcagcaaggacggccgtggcacctgctctgtcctcatccccatccctctgtctctcaggctcaccagcgtgcatcagcgtggggtgagctgggaatcatgtgctgattgctgagggcctggatgatgatggcttcagagggggcaaatagtaaagacggctgtgatctggggagggctagaaactggagaggaatatgaggagaggtggtgcctctagtcccttcctctctgcatccccctcccctgtttctccagccatcaggaggacaccaagaaaaagacctatgaggcccagactggggggcctgcctgtgcagccccttggagacccccttgtaacagggagggttctgagtgcacacagccatctttgtccactttgtagctccccacgcgcctcctccaggagctgtctcgggggtgtcgtgtctcctggatcactcgaggccatgctctttccaggttcccaccacatggccctgcaccctgagttcccttgcagataatatggatgagaagatacgcagatgtctctgggccatttggggagtggtgaccagccccttgtcagggcagctgtcatccctgttttcatcctacttctaggtgtttccttgtccaggccctgaaggacacagtccctcagggacacagtgctcagggaccatgttttttgggctttgttctgtgctctgtggcctcaccttgccctccctgagcctttctcaaggtggtcactttcctgtaaatttggagtaaaggatggtcaggatgatttcccccacagtcagttgtttgaggggaaagtaaaagagaaaacaggaagttttgtgtttctgcaaagacagaggcagtgcaggggaccagtgagaggctgggtgtccaggaaactggagtctttctgccatttccccacttttttgcacctggtggtgggggtgggggtttttcatccttgaacctaattgcactgtctgttggcccctcagtcctgggcagatgggaaggttcatcccctgccctgcagcaagagggccccgtccaggaggcacccacagcaggggcagtgcaggtttgtggtcgctcctgctttcacctgcactgtctcctatagaggggttgtcacttctgggtccccgtgggcaggaaagtttgccttgtaggtcacggggcattggccagggaaagggtgtgaaagtcatgtgctaatttctcaaaaattctcctttaaatattgatgtccaataaagatgttcacaatttccgctggataatcttaataggatttcctctaatattgatgttgtaaagcatgtacaatcaaatgagaagtcaagcttggagcttcctctccaggagggtccatgttggagatggtggttgtggcagtggcaatcctggagtgcagagggtgggtggaggcagcctcaggctgaggggtctccagaaaccccctgctccacagggagaagaagaagattccctgtgggctgtgagggcagtggcctgggtggaagccctgctaggaacagggcaggaaggtcttgcagcctcagcaagcagcagccctggggtggaggtgcatttccaggggtgagtggaccaggcaggagcaaggatggcccaagtgcaggtcacggacccgggtgggtgctgagggtctggaaaggttgggtgtcctcaagcgtggagggtcccaggatccagtcaggtgcagacccggtggcagccacgtgtttttgtgccgagcccccaggcttcttgatgggctctgcagttaggggctggctgctcagggctcggagggtggaacgctgagctgcaggtggagcggggagcccagtgtgcagggtctgccctgttgtgcaagtgcctctgtaggtgaggagggcctggggactgagagggagaaggaccgcgtgcgtgacccagcccaggcctggtaggacacggagctaggaccatcctctctttggggaggtttcccactgtgtctaggctggtggggcttgggaggaggggagggccccgggttccctcctggatctgattcttgtcctttagtcatgaggccctttcattccccacatggtggatggtgggcacagggcaggtatcattgttgagggaatcacaggaggagactggtggaggctggagaaactaggatgggagggaggaaaaagtgggggcgtcagttcttccctcagagaaagggtgaatctgatttcggagtttctgaggagggagaaatcctcagggaatgaaaagcagcactctgcacccagtggagcatttactgtttctctcttttctccagagcacatgagcctacaaagcccagatcaacacctggttgggacaggagaccaccagggcaccatacagctggaatttcagtctctggtgccagctcctgggtctgctggctccactggattcaactccctacccaggtctcaccagcactttccctcttgatgcctcagtttcctcatatattaaatgggaaactaacagcacttatttcttgtggtcagggattgacaactgttagttgctatgaggtgtttgcagctgtgccataatattcggtattattatttttgttgttttgttattatcttattaacttttattatcttttaatgtattgtatgtgcagtaattacatgcaccaaagcacatatgtgcctttaaacacattgtaatgtgcataaaagctttatgagtgtgtgtcctgttgacggttcctcctggcaagcctgggaccagcctttttggcaccttgaggtcccctcacccttggcacactgttataaattaccccatgtctactatgtctgcataattttatactgtggatttttactctttaaatagacatttctggcctgtgctttatttcatgcatctgggaagagtagaatacaaggttcaggggaaaaggagaggtctgtctcaatgccttgacacagcatgaagaaatctctccctcttcctacctctccctgccagttcccagtgattgacagattcacagcaaaacagaaaaggaaaggttgggggtgggggtgcacatctggggccaaaattcaggggctgactctgggggaacatctgccctgaagagttggatccttcatgtgatgatgttgagctgaagtgtaatatcagagatgggggcagagagggctttgagtttccctggtattgaagaataggagtcacactgcttctggggtgaagcgactgctgggaacatgtgaaccaaattgatgaagaataagtgaatggggaatgtgggtgagtaaagcaagcatcagcagtcagtttctgccatcagttcaggctgatcggggtagggaggtggggagatggatattccccaccctgttgctcaatccttcctgactgctgggtgcaccaaaatctcagaaatcaccactaaagaattaattcaggtaaccaaacaccacccacccctaaaaaccttgaaataaaaaataattttttaaaaaagtggccgggcacggtggctcacgcctgtaatcccagcacttcgggaggccaaggcgggcagatcatgaggtcaggagttcaagaccagcctgatcaacatggtgaaaccccatctctactaaaacgacaaaaattagctgggcatggtggcacatgtctgtaatcccagctactcaggaggctgaggcaggcgattctcctgaacctgggaggcggagttttcagtgagccgagatcgcaccactgcagtccagcctgggtgacaaagcaagtctccatctcaaaaaaaaaaaaaaaaaaaaggaatgatattggatatccttattttgtccccaacacagaggagtagttttcaatatttttctcattaattttgactttagatagaggtatttcttttttataaataactttattagcttaaggaagttctcttttatttctggtttattgagtttttataatgaatagttgttgaattttatcaaatgattctcatgcatctgttgacataactgcatgtttttctacctttttctattcatgtggtaaattactctgattttttaaagtcacatttctcttataaatcccattcagtcccattgtacattatcctctccatatattacttgcttctattttctaatattttagatggaattttggtggctgtgttcatcagttcattcagatggtggatatcttttttgtaatgtcattgtcatgtttaagttcttctctgggctatgttgtctcataaaattagttggaaggtgtttactctttttttattatctaaaagaatatatgatagtctgccctccatgtctgtgtgtttcacatctgtgaatttaactacctgaggatcgaaactgttgttgctgctgatgtatactatgtagttaggcctacctacagcggttacatctgtactgaagatatatagactttttcttatcattatttcctaaacaatatagtataacaactatttgcgaataatttacattgaattaggtattagtaatctataggtgatttaaagtatatgggaggatgtgcataggtaataagtaaatactagaccattttatacatgggacctgagcattcatagattttggtatccacagggggccctagatcccatcccaaaaggataccaagagatgactgaataagactgacttttttaaaaaaagttttggaagaattgacaggggaaaaaacgtgggcaaagagtgtttttggtgggaaagaatttaattagaatcccatttcttaatggatataggactacttatattttctattcagttttctgttggcttgttcaattgtcgttttcaagaactcatttcattgcacctaaattttaaaaggtattgtcaggaagttgtgtctaatattctcttattttcattttaataaaatatacggttttatgttgttctttatagtgttcatttctgttttctctctttttatgattgatctttctggggattttgaaatagtttgcccatctttccctctattttccttaacatattaatcataaatactttgagaatgttcttgcttgcctgcttcaatatccacatcaactcttagcctgattttttttattatactttaagttttagcgtacatgtgcacaacatgcaagttagttacatatgtatgcatgtgccatgttggtgtgctgcacccattaactcgtcatttaacattaggtatatctcctaatgctatccctccccacttcccccaccccacaacagtccccggtgtgtgatgttccccttcctgtgtccacgtgttctcattgttcaattcccacctatgagtgagaacacgaggtgtttggttttttctccttgcgatagtttgctgagaatgatggtttccagtttcatccatgtccctacaaaggacatgaactcatcattttttatggctgcatagtatgatagactggattaagaaaatgtggtacatatacaccatggaattcttagtctgattttatctctacttgttgcattttctctgctgcttggcatgccacatattctggatgatgtgttatagaggctctggattttgccatcttcctccacagactgctaacaatttgatagttcattaattataaaagaattacctttggtaaaaatcggacccactttgattctgcttaggcttgattttattttattttattttattttatttatttttttgttatactttaagttttagggtacatgtgcacaatgtgcaggttagttacataggtatacatgtgccatgctggtgtgctgcacccactaactcgtcatctagcattaggtatatctcccaatgctatccctcccccctccccccaccccacaacaatccccagagtgtgatgttccacttcctgtgtccatgtgttctcattgttcaattcccacctatgagtgagaatatgcggtgtttggttttttgttcttgcgttagtttactgagaatgatgatttccaatttcatccatgtccctacaaaggacatgaactcatcactttttatggctgcatagtattccatggtgtatatgtgccacattttcttaatccagtctatcattgttgggcatttgggttggttccaagactttgctattgtgaatagtgctgcaataaacatacgtgtacatgtgtctatatagcagcatgatttatagccctttgggtatatacccagtaatgggatggctgggtcaaatggtatttctagttctagatccctgaggaattgctacactgacttccacaatggttgaactagtttacagtcccaccaacagcataaaagtgttcctatttctccacatcctctccagcacctgttgtttcctgactttttaatgattgccattctaactggtgtgagatgatatctcatagtggttttgatttgcatttctctgatggccagtaatggtgagcattttttcatgtgttttttggctgcataaatgtcttcttttgagaaatgtctgttcatgtccttcgcccactttttgatggggtggttttttttttcttgtaaatttgtttaagttctttgtagattctggatattagccctttgtcagatgagtaggttgtgaaaattttctcccatgttgtaggttgcctgctcactctgatggtagtttcttttgctgtgcagaagctctttagtttaattagatcccatttgtcaattttggcttttgttgccattgcttttggtgttttagacatgaagtccttgcccatgcctatgtcctgaatgtaatgcctaggttttcttctagggtttttatggttttaggtctaacgtttaagtctttaatccatcttgaattgatttttgtataaggtgtaaggaaaggatccagtttcagctttctacatatggctagccagttttctcagcaccatttattaaatagggaatcctttcccaaggcttgattttagactttgctactttgctatttcagtgtggtacttactccaaggccacggccctcactcatagtgcttcaccatcctcatgtctcaacccgggtttggctgggctaaattaattccaatatctcctcacactatgaagcctttggcatttctacatagcatgcaatccccaagcagctgttctctggtgggcttcttacagtatcacctggagcatatgcagctttggagtgcagattttgggagtttcttcgctgtagctccctccttcagcaccctacccttaaatcccagtcaaagtgccaagcctgaactctgatctctgattcctttgctactgagattgattctctctgcttgggttccatttcccttcattgaattttgaaaaaaatcctcttagaaagaaagctgatgaggatgtgagtctctctttcagggactccattccctggagggtgatagtcctgctctggctgctgttttgcagctgcacaactgcatcgtgttttgtctggcttttatacttgtttacagtgggaggatgagttttaaatgagctagtctatcacagttcaagtcagaagacctctaatccttcaatagtcattgcatttgaaaatctgaatagggtaatttgacaattcacaggcaaagttaatatgttatatcttagtgcccagttgaaacctcaatttcatctttaacaaccttatacacacaaaatacacacacacacacacacatcactgtgttatacagtcatgcactgcttaatgatgtttctgtcaatgattgatcacgtatacgactgtcatcctattaaacggagctgaaaaattcctatcacctagtgacattgtagccattgtaatgtcataacacaatgcattaatcatgtgcttgtggtgatgctgatgtaaataaacctactgcactgccaatcctataaaagtctaccccatacagttaaaaacagcatgtaatacttgatgataataaatatgttactggtttatgtatttactatactttttatggtgattttagagtgtgctctaattattttttaagttaaattaaaacagcgtcaggcaggtcctttaggaggtattccagaagaaggcattgttatcacaggagatgacagttccatgcttgttattacctgtgaaataacagtgggacaagatgtgaaggctgaagttggtgatattgttgatcctgaccctgtgtcagcctaggctaatgtatgtctttgtttttaccaaaaaagattaaaaggttaaaaaattaagtagaaatagtttctagaatgagaatataaggaaaaatatttttgtatagctgaataatgtgctggtgttttaagctaagtgctattacaaaatagttgaattttttaaaaaattaaggtttataaatatgaaaaagttcaagacttgaactcagctttggatcaagtggatctgatagacacctacagagctttccacccaaaaacaacagaatatacattcttctcattgctacacagcacctactctaaaattggtcacataatcaaaagtaaaacactcctcagcaaatgcaaaaagaactgaaatcataataaacagtctctcagaccacagcacaatcaaattagaaaccaaaagtaagaaattcgctcaaaaccatacaactacatggaaattgaacaacctgctcctgaatgactgttgggtaaattattaaattaaggcagaaatcaataagttatttgaagctaatgagaatgaagagacaatgtatcagaatctttgggacacagctacagcagtgtaaagagggaaatttatagcactaaatgcctatatcaaaacaccagaaaaatctcaagttaacaatctagtatcacaactaaaagaactagagaaacaaaaacaaatcccaaagctagcagaagacaagaaataaccaagatcggagctgaactgaaggagagagagacacacaaaacccttcaaaacgttaatgaatctaggagctgtttttttgaaagaattaataaaatagaccactatctagactaatagagaagaagagagagaagaatcaaataaacaaatcagaaataacaagggtgatattaccactggccccacagaaatacaaacaacaatcagagaatactacgaacacctctatgcaaataaactagaaaatctagaagaagttgataaattcctgcccacatacaccctcccaagactgaaccaggaagaaattgaaactcttagcaggccagtaatgagttctgaagttgaggcaataaatagcctaccaaccaaaaaaagccgaggaccagacagattgatagctgaattctatcaaaagtacaaaggagagctggtaccattttcactaaaactattccaaacaattgaaaaggggggactcttccctaactcattttaaaaggccagcatcatcctgataccaaaacttggcagagatataacaaaaaaagaaaacttcgggccatgcatgatgaacatcaatgcaacaatcctcaataaaattctggcaaaccgaatccagcagcacatcaaaaagcttattcatcacaatcaagttggcttcatccccaggatgcaaggttggttcaacatacacaaatcaataaatgcgattcataacataaacagaactaaagaaaaaaaccacatgattatctcaatagatgcagaaaaggcacttgataaaattcaatatactttcatgttaaaaactcttaataaactaggtgttgaaggaagagatctcaaaataataagggcaatatatgacaaacccacagccaatatcatactgaatgggcaaaagctggaaacattccccttgaaaaccggcaccagacaagcctctcaccacttatattagtttcaccatcatgagaacagcagtttcttaagctgataaggaacttcagcaacgtctcaggatacagaatgtgcaaaaatcgctagcattcctatataccaacaacaggcaagcagagagccaaatcatcaactcccattcacaattcctacagaaagaatgaaatacctaggaatacagctaacaagggaagtgaaggacctcttcaaggagaactacaaaccactgctcaaagaaaaatcagagaggatacaaacaaataggataacattccatgttcatggataggaagaatccatatcatgaaaatggccatactgcccaaagtaatttgtagatttgatgctattcccattaaactatcatagacattcttcacagaattagaagaaaaaaaaacactatttttttttttaagatagagtcttgctctgtcacccaggctggagtgcagtggcgtgatctcggctcactgcaacctccgcgtccccgggttcaagcgattctcctgcctcaacctcccaagtagctgggattgcaaatgcgcaccaccacgcccagctaatttttgtatttttagtagagatggggtttcacaatgttggccaggctagtcttgaactcctgacctcatgatctgtccacctcagcctcccaaagtgctgggattataggcgtgggccactgcgcctagcctgaaaaaaaaaacaaaactatttttaaattcatatggaaccaaaaaaagagcctgaatagccaagacaattctaagcaaaaagaacaaaactggaggcatcacattacctgacttcaaactatactacaaggttacaatactaaaacagcatggtactgatacaaaaacagatacatagaccaatggaacagaataaagaactgtgaaataagatcacacacctacaaccatctgatctttgacaagtctgaccaaaacaagtaatggggaaagaattccctatttaataaatggtgctgggagaactggcttgccatatgcagaaaattgaaactaggcccgttccttaaactatatacaaaaattaattcaagatggattaaagacttaaatgtaaaacccaaaactataaaaacgctagaagaaaatctatgcaatactcttcagaacataggcatgggcaaagatttcatgatgaagactccaaaagcaattgcaacaaaagcaaaaattgactaatggaattaattaaactaaagagcttctgcacagcaaaggaaactatcagcagagtgaatagacaacctgcagaataggagaagatttttgcaatctatacatctgacaaaggtctaatatccagagtttacaaggagcttcagcaaatttacaagaaaaaaacaaacaaccccattaaaaagtaggcaaaggacatgagcagacacctctcaaaaaaagacatacatgcagccaacaaacatatgagaaaagttgaacatcactgataattagagaaatgcaaataaaaaccacaatgagataccagagtggctattaataagtcaaaaaacgagatgctggtgaagtcacagagaaaaagcaatgctttcacactgttggtggaaatgtaaattcgttcaaccattgtggaagacagtgtggtgattcctcaaaaacctagaggcagaaattgacctagcaatctcattactggatacatacccaaaggaatataaatcattctattataaagatatatacacgcatatgttcattgcagcactattcacaatagcaaagacatggaatcaacataaatgcccatcaatgatagactggataaagaaaatgtggtacatatacaacatggaatgcgatgcagccacataaaggaataagaccatgtcctttgcagggacatgaatggagtgggaagccattatcctcagcaaactgacccaggaacagaaaacaaaacaccatgtgttctcacttataagtgggagctgaatgatgacaacacatggatacatgggggagaacaacacacactggggtctgttagagggcatggggctgtgggagggaagcaccaggaagaatagccaatggatgttggccttaatacctaggtgatgggacgatctctgcagcaaaccaccatggcacacatttacctacgtaacaaacctgcacattctgtacatgtacccctgaacttaaaaaaagggtggagaaaaaaagattaaaaagttacagtaagctaagattaatttattattaaagaaagaaaatgatttttaaaattaatttagtgtagcctaaatgtacagtgtttataaagtctaagtagtgtatagtaatgccctagacttcacattcactcgccactcactgacacccagagcaatttccagtcctgtaagctccattcatggtaagtgctctagacaaatgtgccagtttttaaaaaatcttttaaccacatttttgtggcaaaattttgtgggaaaattcaaagtcttttttctactgttcttacaccccaacaactatcaacacagaaggcttctgcgatgaaacgtaggggatttctccccaaaaacaagcaaacaatcggttctgttatggacgccagctgggtatcctctaactcaattctgacactatctccctggagataattttagatcccgcaagttgatggctcagtcctcacgactgtcaccctctcacttctgatgacaatctcaagccccagattattttgcctgtgttgctaactcactgactataaatcagggttcccaaaacccaccctcaggtttgattgatttgctagaatggctcatagcatgccaggaaacacttacatacattaaccagtttatttaaaaggatattttaaaggataaagagccacatgaagagataagagccacatgaagagatacatagggtgaggtctgaaagggtcttgagtgcaggagcttctgccccatgtgtttgggaagtgctaccctccctggcacatgtctgagttattgttcaccttcctataagcctccctgtgttcagccatacagaagctctctgactcttcccttttgggttttgatggaagccatatttcttaggcatgattcattacatcatggccatcagcttaaccttcagcctctcttgccttcctgccaatggtataatcctatgtctaaaaaaatctaaagatgccaccaaaaaacaattagatccaataaataaattcagtaaagtggcaagatgcaaaatcaacatgcaaaaatcaatataatgtctacacattagtaatgaagtagctaagaaagaaatttaaaagcagtcccatttatgatagcgacaaaaaccccccagaaaaacaggaataaatttaagcaaggaaatgaacaatctctttacaaaaacctacacaacactggggagcagttccaagatggccaaataggaacagctccagtctatagcttccagcgtgagccatgcagaagatgggtgatttctgcatatccaactgaggtaccagggtcatctcactggggcttgtcggacagtgggtgcagaacagtgggtgcagtgcaccgagcataagctgaagcagggcaaggcatcgcctcacccaagaagcacaaggggtcaggaaattccttttcctagccaagcaaagctgtgacagacggcacctggaaaatcgggtagctcccaccctaatactgcgcttctccaatggtctgagcaaatggcacaccaggggattatatcctgcacctggctcggagggtcccaagcccatggagcctccctcattgctagcacagcagtctgagatcaaactgcaaggtggcagcaaggctgggggaggggcgcccaccattgctgaggcttgagtaggtaaacaaagcgactgggaagcttgaactgggtggaaccaactgcagctcaaggaggcctgcctgcctctgtagactccaccgctggaggcagggcatagccgaacaaaaggcagtagaaacctctgcagacttaaatgtgcctgtctgacagctttgaagagggtagtggttcttccggcatggagtttgagatctgagaatgaacagactgcctcctcaagtgggtccctgacccctgagaagcctaactgggaggcatctccctgtaggggcagactgacacctcacacggccaggtacccctctgagacaaaacttccacaggaacgatcaggcagcaacatttgctgttcagcaatattcactgttctgcagcctctgctgctgatacccaggcaaacagggtctggagtggacctccagcaaactccaacagacctgcagctgagggtcctgactgttagaaggaaaactaacaaacagaaagaacatccacaccaaaaccccatctgtacgtcaccatcatcaaagaccaaaggtagataaaaccacaaagatggggaaaaaacagagcagaaaaattgaaaattctaaaactcagagtgcctctcctcctccaaaggaatgcagctcctcaccagcaacggaacaaagctagacggagaatgactttgatgagctgagagaagaagccttcagacgatcaaacttctccaagctaaaggaggaagttcaaacccattgcaaagaagttaaaaaccttgaaacaagattagacgaatggctaactagaataaccaatgcagagaagtccttaaaggacctgatggagctgaaaaccatggcaggagaactacgtgatgcgtgcacaagattcagtagccgattcaatcaactggaagaaagggtaacagagattgaagatcaaatgaatgaaatgaagcaagaagagaagtttagagaaaaaagaataaaaagaaatgaacaaagcctccaagaaatatgggactatgtgaaaagaccaaatctacattggcttggtgtacctgaaagtgacagggagaatggaaccaagttggaaaacactctgcaggatattatccaggagaacttccccaacctagcaaggcagaccaacattcaaattcaggaaatgcagagaatgccataaagatactccgtgagaagagcaactccaagacacattaattgtcagattcaccaaagttgaaatgaaggaaaaaatgttaagggcagccagagagaaaggttgggttacccacaaagggaagcccatcagactaacagcggatctctcagcagaaactctacaagccagaagagactgggggccaatattcaacattcttaaagaaaagaattttcaacccagaatttcatatccagccaaactaagcttcataagtgaaggagaaataaaatactttacagacaagcaaatgctcagaaattttgtcacctccaggcctgccctacgagagctcctgaaggaagcactaaacatggaaaggaacaactggtaccagccactgcaaaaacatgccaaattgtaaagaccatcgatgctaggaagaaactgcatcaactaacaagcaaaataaccagctaacatcataatgacaggatcaaattcacacataacaatattaaccttaaatgtaaatgggctaaatgctccaattaaaagacacagactggcaaattggataaagagtcaagacccatcagtgtgctgtattcaggaaacccatctcatgtgcagagacacacataggctcaaaataaagggatggaggaagatctaccaagcaaatggaaaacaaaaaaaggcaggggttgcaatcccagtctctgataaaacagactttaaaccaacaaagatcaaaagagacaaagaaggccattacataatggtaaagggatcaattcaacaagaagagctaactatcctaaatagatatgcacccaatacaggagcacccagatccataaagcaagtcctgagtgacctacaaagagacttagactcccacacaataataatgggagactttaacaccccactgtcaacattagacagatcaacgagacagaaagttagcaaggatatccaggaattgaactcagttctgcaccaagcggacctaatagacatctacagaactctccaccccaaatcaacagaatgtacattcttctcagcaccacaccgcacttattccaaaattgaccacatagttggaagtaaagcactcctcagcaaatataaaagaacagaaattataacaaactgttgctcagaccacagtgcaaccaaactagaactcaggattaacaaactcactcaaaaccgctcaactacatggaaactgaacaacctgctcctgaatgactactgggtacataatgaaatgaaggcacaaataaagatgttctttgaaaccaatgagaacaaagacacagcataccagaatctctgggacacatttaaagcaatgtgtagagggaaatttatagcactaaatgcccacaagagaaagcaggaaagatctaaaattgacaccctaacatcacgattaaaagaactagagaagcaagagcaaactttacattcaaaagacagcagaaggcaagaaataagtaagatcagagcagaacttaaggagatagagacataaaaaacccttcaaaaaatcaatgaatccaggaggtggttttttgaaaagatcaacaaaattgatagaccgctagcaagactaataaagaagaaaagagagaagaatcaaatagacacaataaaaaatgataaaggggatatcaccaccgatcccacagatatacagactaccatcagagaatactataaacacctctacgcaaataaactagaaaatctagaagaaatggataaattcctcaacacatacaccctcccaagactaaaccaggaagaagttgaatctctgaatagaccaataacaggctctgaaattgagtcaataattaatagcttaccaaccaaaaaaagtccaggaccagacggattcacagccaaattctaccagaggtacaaggaggagctggtaccattccttctgaaactattccaatcaatagaaaaaagggaatcctccctaactcattttatgaggccagcatcattctgataccaaagcctggcagagacacaacaacaaaaaaaagaattttagaccaatatccctgatgaacatcaatgcgaaaatcctcaataaaatactggcaaactgaatccagcagcacatcaaaaagtttatccattgcaatcaagttggctttgtccctgggatgcaaggctggttcaacatatgcaaatcaataaacataatccatcacataaactgaaccaatgacaaaaaccacatgattatctcaatagatgcagaaaaggcctttgacaaaattcaacagcccttcatgctaaaaactctcaatacactagatattgatgaaacgtatctcaaaataataagagctatttatgacaaacccacagtcaatatcatactgaatgggcaaaaactggaagtattccctttgaaaactggcacaagacagggatgccgtctctcgccactcctattcaacataatgttggaagttctggccagggcaatcaggcaagagaaagaaataaagggtattcaattaggaaaagaggaagtcaaattgtccctgtttgcagatgacatgattgtatatctagaaaaccccatcatctcagcccaaaatctccttaagctgataagcaacttcagcaaagtctcaggatataaaatcaatgtgcaagaatcacaagcatttctgtacaccaataacagacaaacagagagccaaatcatgagtgaactcccattcacgattgctgcaaagagaataaaatacctaggaatccaacttacaaaggatatgaaggacctcttcaaggagaactacaaaccactgctcaacaaaataaaagaggacacaaacaaatggaagaatattccatgctcatggataggaaaaatcaatatcgtgaaaatggccatattgcccaaggtaatttacactttcaatgccatccccatcaagctaccaatgactttcttcacagaattggaaaaagctactttaaagttcatatggaaccaaaaaaaaagcctgcattgccaatacaatcctaagccaaaagaacaaagctggaggcatcacgctacttgacttcaaactatactacaaggctacagtaaccacaacagcatggtactggtaccaaaacagagatatagaccaatggaacagaacagaggcctcagaaatgacaccccacatctacagccatctgatctttgacaaacctgacaaaaacaagaaatggggaaatgattccgtatttaataaatggtgctgggaaaactggctagccatatgtagaaagctgaaacaggatcccttccttacaccttatacaaaaattaattcaagatggattaaagaattaaatgttagacctaaaaccataaaaaccctagaagaaaacctaggcaataccattcaggacataggcatgggcaagaacttcatgactaaaacaccaaaagcaacggcaacaaaagccaaaatagacaaatgggatctaattaaactaaagagcttctgcacagtaaaagaaactaatatcagagtgaacaagcaacctatagaatgggagaaaatttttgcaatctacccatctgacaaagggctaatatccagaatctacaaagaacttaaacaaatttacaagaaagaaacaaacaaccccatcaaaaagtgggccaaggatataaacagacacttctcaaaagaagacatttatgcagccaatagacacatgaaaaaatgctcatcatcactggtcatcagagaaatgcaaatcaaaaccacaatgagatagcattcatgccagttagaatggtgatattaaaaagtcaggaaacaacagatactggagagggtgtggagaaataggatcacttttacactgtcagtgggagtgtaaactagttcaaccattgtacaagtcagtgtggcaattcctcaaggatctagaactagaaataccatttgacccagtgatcccattactgggtatatacccaaaggattataaatcaggctactataaagacacatgcacacatatgtttattgtggcactattcacaatagcaaagacttgacaccaacccaaatgtccatcaatgatagactggattaagaaaatgtggcacatatacaccatggaatactaagcagccataaaaaaggatgagttcatgtcctttgcagggacatggatgaagttggaaaccatcattctgaggaaactatcacaaggacagaaaaccaaacactgcatgttctcactcataggtggaaactgaacaatgagaacacttggacacagggcggcgaacatcacacaccggggacagtcatggagagggggctgggagagggatagcattaggagaaatacctaatgtaaatgacgagttaatgggtgcagcaaaccaacatgtatacctatgtaacaaacctgcacattgtgcacttgtactctagaacttaaagtataataaaaataaataaataaaattaaaaaggaaaaaatatatatgtagaatatatataatatatgtatttatttatttatagaaagagaaattgaaaaaattctgaaaataaatgataatggaaatgcaacataccaaaacctaagggatacagtgaaagtaatactaagagggaagtttatagctataagtagctacatcaaaaaaaaaagaaaaacttcaaataaacaatacaacaatgcatcttaaatagctagaaaagcaagggaaaaccaaacccaaaattagtagaagaaaagaaatatgaagatcagaacaaaagtaaatgagtttgaaatgaagaaaacaataccaaagatcaatgaaacaaaaagtaagttttttgaaaagttaaacaaaattgacaaatcattagccagactaacagaaaaagacagaagacccaaataaataaaatcaaacatgaaaaaaggacattacaactgatactgcagaaattcaaaggatcatcagtggctactatgggcaactacatgccaataaattggaaaacctagaagaaatgggtagattcctagatacatataacctacccagattgaatggtgaacaaaatccaaaacctgaacagaccaatagcaagtaatcagataaaagtcataacaaaaagtctcccagcaaagaaaagccctgatggcttcactgctgaattctaccaaacatttaaagaaaaactaataccaatcctgttcaaactgttccaaaaaattcaggaaggaatacttccaaaatcatcctacaagggcagtattaccctgataccaaaaccggacaaagacacatcaaaaaaaggaagctataggccaatattactgacaaatattgttgcaaaaatcctcaacaaaatactagcaaataaaaatcgacaacacattaaaaagatcattcctcatgaccaagtgggatttatcctagggatgcaaggatggttcaaaatatgcaagtcaatcaatgtgatacatcatattcaacagaatgaaagacaaaaaccatataatcatttcaattgatgctgtaaaaacagtcaataaaattcaacattccttcatgataaagactgtcaaaaaactgagtatagaaggaacataccttaacataataaaagccattatgtacaacaaacccacagctagtatcatactaaatgaatggggaaaaattgaaggcctttcctctaagatcagtaacacaacaaggttgcctgctttcaccaccgttattgaccatagtattggaaaccctagctagagcaatcagacaagagaaagaaatagaagtcaaattatccttgtttgcagatgatataatcttatatttggaaaaatctacaagactccaccaaagaactattagaactgataaacaaattcagtaaagttgcataatacaaaatcaacatacaaaaatcagtagtagccaggtacagtgtctcatgcctataatctcagcactttgggagatagaggagggtgtatcacttgagcctggaagtttaagaccagcctaggcaacttagggagactgcatctttaccaaaaaaaaaaaaaaattgtaattagctgagtgtggtgacacgtgcctgtggtcccaactacttggcaggctgaggttgtaggttgagactgcagtaagttgtagtcatgccactgcactccagcctgggaaatatggcagaccctgtctcttaaaaaagaaaaattaataaggcgtgatagtgcatacctgtggtcccagctgctcaggaagctgaggcaggaggaccacttgagcccaagaagtcaaagcagcggtgagctgtgttcataccactgcactccagactgggcgacagagcaagaccctgtctcagaaaaaagggaaaccctggacattcctacacctgaggcctcttcaatggctgctgccaatgactttggccacaagggatgatgtatgaaggaaacatgggccctgaaataaaattggtctgaatttgaacatggcctttaccatttttttattactatggacaaattaccctcattactgagcattggtttcttaatatataaactgggagtaatatccccaattaataacaatgggacatagcaggatggggttgcccttttcacccttttcatccctcctctcactcactggatgagagtttctacacaataatcaattggtgctgtgctgtgctgtgtcactttgcatctgctcatgagaggatattttgtctttaagatgcctactctaaagatatgaagagctaggaaaatggtaattgctgcccttaagcaagcacttggtgcagtggcagaacaaagttggaattttggggttggggtagacaaggaaagagggctgcagacttagggaagaagaacaccttgttggccatgtgaggagcatccagcacttgctacagttagtgggagcaaaacagtacagagataggtaaatcatgctgtggactgtgagtatattcttgatcagccagtgattattccactctctactgcctttaattggagatctacattaagctacacacacaaacacacacacagcttatctgggtagggatgaataagaaaaccggtccttttcacaaagatctgcagctgaaattcacatcatctgcatggtccaaaatgggaatccactgatgctgtaagtccatccagcctagtggagcatagtgtgggctagataaggatgatatgaaataatgaatgcaaaacaccagcacaggaagcggaatatggcacatgtgcaaaacactgcccattccttgtaaagccaaaatagtatgtatttatttaaaggacctgggtcttcgagtcagacagacctggatatcctgggactgctctgatcagcatgacatacagaaagctatttgaggcttcatagagctcagttctttgtctgtaaatactttcttttgtgtgaaaattaaattaaatagcaatagggcttgtaacacatttgacacaattgctggtactgcaatttgtggtgctaatgacaacgttagtgatgatgattttcttctgtagggcaccatgttctctagggaatggtgaattctagaggccaagtcttaccctaaagttccatgtcaccctatgaaaaagcatttgggataaaacaggcttttgagtccctctaaaaacagagcatgtgagtagttggtatggggatccgagttgggttggggaaagaggcaattatttttattcccttcagtatgttctatcctctctgatatttctaaattatctacactttctccatcaacattccctttttaatttgtaaatataactttttctcattataatgtaatatatattcactgcagaaaaattaccaaatatttcaaatgatcaattacaaatttaaactatcccatgatccttacagcagagatatgtggtttcatttccttctagtcagttatatattttcctgctgctgccccattactggatgtgtgccattctctctctctctctctatctctctctctctctctctctctctctctctctctctctctctcccacccccaaagttatgaccacagacctcagtggcccacagccctgcactctccaaatgccatctcccaggtcagttcactcttacaattcctcagggggctgtttctcactttgttctctgccctcacatccctccactccttccacactccctatttttaggttatacatttatttctctttcacgcaggaaaaaaaggaggacccaggtgagaaatgcatcaccatcccattactatccccaaatctgcacttgtatcctcagccttcccaccagtgatgatggatgatccccgctcctaagaccacccctgcactcaagcataagatcaatccttccttcccctatatcatcaatttccactctctactggcccatcatttctacaggcagacgtgctgtaatatctccccccaaaaaaacaaacaaaactggactaaacaaatcaaaacaaaatcttcccatcgaaatttatcccttgatctctgatcccatgtctccctgcaactactgccctatactatggcagtcttcataggacaatctctgagtctattcttcatgtagtcttttgaaacattgcattttttgttgtttgtttgtttgtttgtttttttgatacggggtctccttgtgttgccctggctggtcttgaactcctgggctcaagcaattctctttccttagcctccaaagcactaggattataggcttgagccaccacacttggcctgatagtataatgttcttacactttttctttcttttttgcaaacatttttccattttattatgacttttgtcttccaaattatctaatgaattgttcatttctatgattctgtaatcacatttttaatttccagagctcgttcttgtgtataattttacataaatgagttcctatttcataaatgccacttattttcttacatcctttatatattattgataatagtagcaggggacttgttgggtctccttgttatcttctttcatgatattatgaaattttctctcagaattcataaatgtagtggtttcacatttatcttggtaatttttgctaaatgtccgtctctctcatgacagtgcaagctccatatcatcaagatcttactttagctcttcttctatcttcaatgtctagctaatatcttgattcaccttgaaatatacaccggatgatggactttagtgtggtgtgggcagtgaagtcacacatgcccttttgtcctcccgagctctaagcctagcagctgcctgtcatagaatgttcacggacattgaaatggttcacttgcatggggtgcagagtcacactcacctaccttatgggcagagcatcaacaaaagatgagtcaattaggtgtctgagagaagatctcctggcttcaatccagcttcaccacctcctcaacctctctgagtcacatagtagattcctgatgggttttctctgatgattaaattatatattgtctatgtattatacacattattactgactgagacatattaagtgtccacaattcatagctaacatcatattgattatactattttggttgttttcattcttttgttttataaacgataattcaaggaatattcttgttatatatttttaaaaacgtgtgattttcttcttaggctacatttttagaagataagttttttgcatcaacatgatcttcttgagacattttccaaaaatgctctttagacactggggtgttttttctttgagatggagtctcactctgttcctcaggctggagtgcagtggtgtgatcacagctcactgtagccttgacctccccggctcaggcgatcctcctgggactacaggagggtgccaccatgcctaattttttttgtattttttgtagagatggggtttcgccatgttgccctggctggtctggaactcctggactcaagcaatctgcccacctcagcttcccaaagtgctgggattacaggcattaagccaacatgcctgactctttagaaattgtatgccagtatttaatcccatcaacttttatgacagtaaatttcccctattctccactcaatattattatctttgactttcatctttgccaagctaagatatattaaacttccatcccatttcctaatccacattttaattttgttgacatttacttattactattatatttgacacttgcattttctatgccaaattatgctctaatattcattaatccttttccaaatgggacgtagatatttttaaatgttgaatttaagaaagaaaacaagaagcctctgatatctaggaactgatctgacacttatggctgggactccttgttatatgaagctggcccaatgttcattgttaagccatgttattctcctattggaccacaatcaccacaaaataccaacattagaaagttcactctgagatgatgataaagtgaggaaatacaagaacacttcataattttgtctaagcactctctccactaataccaggggctgatgcttgtctaccaattacagctttattctgctctagtccaccctcactagagctaagatttgttgagacattcaattacagaattgcccctgcttcctgacgagtacccaatctagagtgaagcccacttcctcaccctccccaggatcacccaaccaaagcccaaatcctttaagaatttctttctaacaccctcttaccaaaacaccacatggctcacagcacctattcttgcactcaggaaccagtaataaacccaacttcttcacccactaggatatgttcctagtggactttggaagaaagcttcggacgcattattattttgtctataaattttttatgtgtctttgaggttgattatgagaaactgtctgtatatatctatgtttgtggttaccaaagagaagttttttaatttataagtacttaaaactaccctcatacttctttatggtgtttatttttaggtcatgcttagagaatccttcttcactgcccaattgtagacacttcatgtatagttccagctaggttgtgacaatgaggaaagaggagtccaagggtgaagaaaacaaaattgttggaatacaaggggaggaggggcagcaggtaaagaattctaaggtttaagtctcttgttttataatttaaaaaatatgtctacagagccttcaggatacttgacatatgtcatatccaatagtttgtcttgagaaaaatggatacttatcttctccttgtattcacctggttaaagcaaacaataacaacagaattccagtgcaatatagacaatgattagccctggcaatgggcatttttgaacacttaaaatgttgaggtgataaatcatgtttcggttaatgtctgtaccctccacttatacatatacatattaattagactttcgtgggcttgctgtgttttaaggacgtgtctaaggcccatgtggacaaatccgtgacttctcgatgaagataatttaatatatattcaatctgagagtcccaccatatattttgggggagattgaaaactatgagcactctagatatgcactgttaaatatggtaactactgggcatacatagtgtagggtttgtttttgtttgtttgttttcattattagtacaaatccattcaatgggcaagatagaccaatctattttaacataacagaatacaaatagtcaatgatagggtttcaggttgtatctaacctttaagaaattaccacttgctaggacttccagtactatgttgaaagaagtggtgaaagtgggcgtcctcgtcttgttccagttctcagggggaatgctttcatcttttctctgtgcagtataaggttggctgtgggtgtgtcataaagggcttttattactttaaggtatgtcccttctatgctgattttgctgaggcttttaatcataaagggatgctggattttatcgaatacttttctgcattttattgaaacgattatttcagagagagagagagagagggagggagggagggagagagagagagagagagagatggggtgaaggaacaggctgggaacctgggaggagacccggccgcaggcgcgaagcctggaggcgatggtgagccctgccacgcgtgagtcacggaccacccccgccgcgctctgcaccccgcctggctctcttcttcccagcccctcccttcctcctcctgtccgctgatccctactcaggcttctttcgcttaagaattccagaagggacagaactaaggatgaagtgtggcatttgaacagggtttacggctagatcctaggaggtcattctaagggtttacattgcatcaccgtctgtggttacaaagagctttccgggagaactttccatttgtaggtttggtcagggagaccctgtgatcaccccagtgcccagagaaggaaactgaagcccagggttctgcagaggcttgcccaggctacacagatcttcagctagattcgaatagttaaaaatccaggtgatcaaaggcggagcagcgtcttccaagagcccggagagagagaacaccccactcctggacgttatattctgcagcccgctgctgggaaatcccaaggggtatgcgaccaggttggagtatcctgggcccagggcccacgaaaatggctttcactgttggaggggatcttgaatccagaatctgttcccaaaaaagagaaagaaaagcagatttgggtgacctcaaaagtttcaaactaccttcccacgtatcctaaaaaaaaaaaaaaaaaaaaaaaaaaaaaaaaaaaaaaaaaaaaaaaccttcatttttaatatataaagacactgaaaattcaacagtttaaaaaaatcaataaaataggaaagtggacaaaacacatgacaaatatttcttttaaaatgatatgtagatgggaagtgaggacacaaaaatgtggtccatatgcggagcttgcagtgagccgagatcgcgccactgcactccagccggggccacagagcgagactccatctcaaaaaaaaaaaaaaaaaaaaaaatgtggtccatatgattcatcattggggaaatgtaattaaaaccattatgagatattactacacccctatcagaatgaataaaataagaaatagaaataacaccacatgctggatgtggagaaaatggctgaatcactcattgctggtgggaatgtaaaatggtacagccactctagaaactagagtatggcgaaaaaaaaaaaaaaactaaacatgccattgcactctagggcatttatcccagagaaatgaacacttaagttcacaccgaaatcagcatacagcatataaaggttcgtagcagagcagagacctgagcaggaaaaaaaaaaaaaaaaaaaaaaaacccactgtcacagccagacagaatcagttctggaaactcccaaaagaactagaagccaccaagaccggcagcccaccttgggcagtgacagtttctgctcaagggagacacaacctgaagaaggaaaacaagaccaaaattgagaagcaatcttttaatcacagtgtttgcaaacacatagccaggaaagaatgttagcacagaggtcagaaaggcagtcactcatggagctaggaaagggaagaggtgtgatgggagggggcaagcaaggcatttgtgggacactggacaactgtgcttcttgacctaggtggtgcttgtgtggtcatagtcgctagttaaatattgtgtacatttgtaagtaacttttctgcatatattttatatctcacaaaaaaagaaaagagatcagactcctcccagaaaaacaatgaaagaaggaggtgtcacaccaagatcagtcaaacctccttcctacatttgtaaatccatccaagcactagctctgtgaccctcagtttcctcatctctattgagactcagcatctgcaagagtttaagaacaagaccatgggtagatcatactgtcataaaatagaatctgtttcttgtgatacaacatgagggaccccacctcaccccccaaaataggtactgaacaaaggttcctattcccagaaaccccctcttccatctttggattcatccctgagattgcagaatgcttctggctgaaggcaaagccccatctttatgattcccctcctccttcgtccacctctccaagatctaggcttctccctcatgcctcagactccagggcctgttccagggtcaggatcatagttcccttcttcagagaggaactcttaatgaagctgacccaatttgctctggagagcactggaggcacctgctaagcctctcccttcagtggagagaaattccagtggaatcccagagacccttggcaaacccactgcagaccaccctgctgaacccatctccacactcaccactgcaaggaaacttcaaactgagttctactaaaaagcaatttcggctcttacacttcctctttagtgttcttctagcttactaggcaagtaaccacagtgtgcctccattaattaataaatccccaaaacactggtcttatgaacagtgtattgatcagggctctccacagaagcagaatgaataggcgacatatatctccagttgatctgatgaggcccactcacattatggagggcaatgtacattagtcaattccactgatttaaatgtaaatcatttttcgaacacactcatgggaatacctagaataatgtttggccaaatatctgggctccttcgtgacccagtcatgttgagaaatcaaattaatcctcacaaggaacaaatcagataatattcacttggatattagactagagccttggacataccaagtgctctgtaaatgttagccttacaaatgtaaggtggtgttttagatttacagaacacagtatatcctaaggtatcacaggcttgttgatgaactctgttgggaaaaataatacatgggaaatttagttgtggaaattgaattttgttattttatttttgtctttgcttttctgtgtgagtgaaggagtataaggcaaatttctgagcacacggggcatgcactaaaggggtttcatttggcatttggagccagttttgtcacactataggaaaactaaaccgttatttaagaacttccctgccagctctcacgttggggactggctggtccatctagcctggttggttgattccaaaaatatgtgtagggaggtagagtgactaaacgtgaagaatggggaactctggaagtgcagaattgaagcccagaagggaacagaagcctccctctacttcacagaagatgactaggagatgctcatccctgggatagaaaatccattggacttggagactcagtgagttgtattcccgatctcaccactggagggaggtgggagaggcatatgagtgagtgtggaggggctcagaagcccagccagctagtgtgcaggttgccctgcagattctcaccagggctgctctgaagcccagagggcaccccagaggaggaagggaatgacaaagcctgcctggggtcacaggaaaagaggagagaggcagactgaaggaagcccaagactacaaagtgaaagaaaatgccttttagtcactcaagacattgtcagacacagactgggagcagtggctcacacctataatattagcactatggtaggctgaggtgaggccgggagttcaagaccagcctggacaacaatgcaagaccctatctctacaagaaataaattaataaaagacttcttcggacatgactagaacccaagaggtgggtacctggtagagttatatgggaagaatggagcaatgggtttggccgttggggtggggaaacagggaggaagggaatgaaaaaaactcttgagggtagatgatggtgccagtctgagaatcaagcaccagttccattctactgtgcatctagtcacgttggcatagacttccaggcaggaggaggagcaagcggtgggatcagctacatgtgggcttccaaaggtaatcccaggtgccacctctcctccatacttactaggaatcccaggcccttccctgaagtgacaccatcctgcattctttgtacctctccttccacttcttctcacagcttttccctccctcctccattctcctggccaggacccacactcaccccacctaacctctctcttttgatcagtcccatagttcagaaaggaacagaaatgccagctgaataaaaatttatttcgtgctctctgggcatgtatttgagaacaataacattgtttccggtctcaatgcactttcaccacatctgattttcagctatgtggggaaggccatctatctgatcaacccatcacccagtgaaggaaactgaggcccagagccctgaggatgcttgcccaaatcaccctgcccttcagctaaatcacccagaacaggatcttgcaagggccctaagagtcagagaagacagcagcccctcgtgttggattctcctgcctgcccaggaaactgggtgggaaccattcagattcttcctgcatgaaaagggtgacctgtgtccttggggatcctccagtggccctagttgctcctgctgagggtgacctgtgtccttggggatcctccagtggccctagttgctcctgctggggatgacctcaactcctgaatccaaccctgtaaaataagaagaaattcagacattgcaaggcatgaaaaattttctcccaatagcaaaggtgaaggatgtactcggagaggagggaacataccaagaagagaaggaaggaatatatattgaaaagaatacaaaacaaaaataaacagaccaagacgtgggatgtatagaatcaggcatcaacccatgaaaaggtgaaaaggtgaaaaggcaacaggaccagaaaggaagagggtcgcctgggtgggtggacagcacagcagaggggacgccatctccaagaagatgaccttgacaagagccaccataagtttaaaggtatggagaagacatttactcaactaagggacagttggtgaattcatttgttaaggttcatggaaagtaagaaaatgaaaacgccgggcaattatcaattctctgaaaacatcaacatgtatggaaagaaaaactaagagagtttaccatgtggctcaggtctgagtagcattcacgtaagtcagtaattttaactctggctctcaatgcactcaaaatctccacctgcctacataaggaggatgaaaatgtgtgtgctgtggaaggtactatggactgaagggattttgaaaagtcaatacttaatatctaaaatggaaatgtttgaagtggcataaatgtatattatcaagagacataaagataaagaacaacatatgaagtaaaaggcttctatgtggttgtttgccaggaagctggtggctaggaaggattgagagggagtagaggggagaccatgttttgtaacaggggaaatgaaagggaagcaggtagcacctggagcctgcctcatgtagagaacagggttccacgcagtggtccaggatctcagggacttactgtggctgaggccacctgcccccaggacaagcccttggcactgagtctactgaaatgtgggcagggagaagaggaggccttcggaccttttacctgagcagcctggtttactctaggctctgtcttgtttcctgtccagagattaatgcaacaaactgtctccaaattcatccaagggagtggagttccttcccctactcccgatccccctcaacaccatcctttctggaagtgttattctgaacatgttctcggatttgtttttatcagtggagaaagagaggatagaagagcactcacccaacagagccagagggaggcagctccaaggactccagtggccaccagagcccaccaggacccagggctggaggtgcatagtgagatcctcagcgcagagggagaaatctcctaagggtaggaaggaataacagaattggggagcatttccttacttcacagcaagtgcaaacatgatgggaaggcatagagaaaaaggaagaaattatagggaaatgtgcttatttagggggaggcaatactgcgggaggggtacaacagacccagcactggtgggggctaggagaaacaggtataatccttgactagagaatggatacttgaggtcagaatagttactaaatgaagaggattacatacattttaaggacgttgatttacgttatactttgtcattggaatttaagggaaaagaaaggaaattaataaataaaaacaggctgcatgtggtaaaatcaatagtcagccctgggacttgtgtttgcaaaatgctttatccaggtgcgacaccgctgacgtcctggattccccaccctctagcacccagttccctctcctgtaatgagaccggggtcaggaggagagatggacagatgagcccatgctgaaggcagtcagtcatctgtgcctgcagatgagaaactgcagtttgcaccactagcctccagcacagagattccatcccagctcagtatttagtatttagagatgtagtatttagtatttagagattcctaaacactgaggggctctgcccagtctccttcctcacactgtggggccttggctttccctcccaactccacacccccaaatgctggtacaatgctcaggttcatcctggacaccgctccatccgacaggggaacacttttgatccagacgctttgacaacctcgttcagtctcctctggagagagccgccaaaccctttgctgatgagctgagactgaccggggaactgtgatctcggatgtggttgaggatcaaaatcaaaattatagtcgactcttaaagaccaagtaggctctaaccacggaattcctctctacccactgattcccccaaaagaggaagaagcctcttctctaagtacactaagctgaaaaactaagctgaagtactaagtacattcagctttcactaagctgaaacagcaaagcgctgaaacagcaaaccgcaggcataacagaaaaacctcaacttaaatagtgctgagctgcaacttgttttccgcggcttgtagtcgaggaggagcccacgaggctttagctgctgcaagatccaagcgcgctcccgcccagcggtggccccgggctcagggaaccagcgctgcttctctccgaggctcgcggcctgagaaaccttccgctccgaatgcgggctggcctctccgggaagccttgaaactcaactcctgggtgggccaggaaggttgtccgagttgggcagcgccggccggggcacccctcagagccgagctgctcgcctccctcgagacccagcgcagcctggaggagagaccgggtcctctcaggtggggcacttggtgactagagaccccatgagcccccaccctccagcctggggcgggatagcccaatcggatgctggggggtccgtttggaaaccactctctgctttgaggacacgcgcggagcttccctgggagcaggaggctctgaaggaagaggggcagacgcgaagcctctggccagccgcgcctccggtccaggcctccctgtgtccacatcaggtctcccggcttttcacaacagtgaccttgacagcgcccagagtccgcggcttccatccagtcccctcttcccctgcgaggccgagagggtgcagagctggtggcttcaggaggtggctgtgagcgcgggtctggggccaagagcagaggacaggagaagactgccaagccaccaccggtcctgcgacatattcaccagctgccggcggcgaggtcagaccccagattcgggtttgcccagcaggcgctcggcgtccatgctcgctctccacctccctgcctctcttaaggaggacctggcccattaggaagcccggggcgttctgtggactgggtggtcaaaaatggtgtgtggaggagggagtcaattgagattagacgtgaaaaacggggaacctggggaccgcaggttggggcccaggagaggaccgaagcttccatccaagactaagtgaggaacactgcggcaagaggaaggaagattgagtcgcagttgacttgtggattttatcggttttagtccctgtgtgaccgccagaagtctgcagctttatccttgatgagttctgaaggcccctgaggagagctgagcccaagagactttttaattccacggaggtacttcgcctgaggcaggtctcttctgtgcccagggaaggaaggctgggagtgagggtatctgaaaatattcacatgagaaaaggtcaagtccatttttgctatcctgtactgaacacagatcaattaactggtcccaggattgatagcaacaggcctataactggtctcctggttcctatccagcccttcccccataaagtcagaatcctgtcttcttggaacagtgaatccccagcagaggacctcagcctgggctgcctggaacctgctaccctgcccaggagctgtcaacacctggagcgcagtgcaggaagaatgcaggggcgcttggtggggaggtgagtgagtgcagagggtctccgggaactccttgggcctttggggtagctccctctcaggctgtcctgcaggtccttacaaggcccactactgagcaggaagaatgtccccaggagaggcaaagggtggggcaaaggcgggtatggggtcgcttgcactttgcagcaaactggagagtgagatgacaggcaaggagtactggccctcacatggaaacctatatcacactgcccaaagggaataggaaaggaaccacagcgaggtccacaggggagggctgggggaagccttacccagggcggcgagtgcagcctcagtggcagaaatcccagcgggccccctcctgctgcagaccccgctcctcctgcgaggccccagacgaagcccgacccccagctgcctgcgcagcctccaggcaggggtcgcggggtgcttcggcgagagagtctgggccaaagcgccaaaatccgccgctgtcgctcagccgcagcctgtttggggctggggagcctctcctggtcggtgatcgtcgcggacaatagacgagaccagaaattagatttggttccgggatcaagaacctttaatcagggaatggagatggcaggggacgaggcctaagagatgtagacagcaggtcctgtctgcttaggtcgcaaaggggaaggaaggggcgggactcggggtcctggactggggctgggaagggtccgctccaggagggtgtgggttccgatgcctgggtcctggaggtccggggagtcgcggagggacctccctccggtaaccgacggattggggacaaatgctctgcccagtctgatcccagacatccttgtaacccaatatagttacagctccgacgccatgttcttcctgggtccagctccaacgccatgtccttcctgggtccctccaaagtagggttggaggatcaactagtggattccggcgaggaggtatcttcctccctggaagcagcagaacaaatttcagggactcgggagtccaaggcctcattccaaaaacactgagagattgggtactgggcgcacagtatgtctgtggggtcacgcagacctgggaaccagatcttagggcctgcagacctccctctgccttgagatcagactccaccgccagtaactgggaggaaacatctgtactccaggatttggagacaccgacacgggagcagggcgcccccgtgtgcacagagccctgttctgcagctggaaaccgaacgggaccctgtggaagtcgcgggtggggaagcgaaaggggagctgagtgtctgtcctcagtccttgggccacacgggggcgctgccgctctgcgctcggattctgatgagccgctctggagaggacggggcggtggtctgagtaagacacagattgttgatccagaaaggatgtatcaatgaggtggggctggggttgtccagggggtggaaaggccttctgagaagccctggactgcgcggggttccggctctgcggaacagaggagggctctggagctgcctgtctctgaagtttccaactcctccttgcaaaccctccctccagccttttcatggcaacactccaggaaaatggaaagttgatcatttttttcttccactccttaatcctttcgtgactgctacttttaaataattttattttagaagagttttaaatttacataaaagttgcaatggtagtacagagttgccatccgctccacagtttcccctgatgttaacatctctcattactatggtccatttgtcacagctaatgaaggcattttcataccttattattactaaactgcagactttatttggagttcattagcgttcccctaatgtcctttctgtgtttcaggattccatggagaatatcacactacatttagtctccgtcgtgcctccgcggcatcctctggtctgtgacagttcctgagattttcctaatttttgatgcccttcacaatattgggaagtactgaccagatatattgtaaaatgtccctcaaactgaatttagttggggtgtagatcatggttagactatggttatgggtgtttagatgaggtgaagtgctattctccaaacaccttatcaaggttatagaatatcaatttcatgtaccactgttgatgttgaagttgatcacctggtatattagcttcctgtagctgccacaacaaatgccctcaaagttggcaacttacaacaacagaaaattattctttcacagttctggaggcccaaactgcaaaatcaatatgcagggcctcactccctctgaaggctctaagagcaaatccattccttgagtcctccagctctggcagctgcagggcattggtcagcgttctttggcttgtagccccattgctccagtctctgcctcattcttcacatcaccttctcctcttctgactctctcttctgtgtacctgttagaaagacacttgtcattggatctagagcccacctgggtcatctaggaggatctcctcatttcagtatcctccgcttaattacatctgcaaagaccctttttttccaaacaacttgacattcacagcttctgggcactaagacagaaacatatctttgtggggtccaccattcaacccactacatctggctaagctaatatttccagaatggcaatccatcagtgcaccctaggttacaatcctcattctcattcccaaataaactcaacatatttggacatttctaatgtcatgttttttaggttgaataatctagtgtcagaaatgatcctgaagaaagattatctttggaagagacttatactgagtttgttgcttgatttttcctctgcttctgaatatcttttgagagcaaaatttactttctaaaatggtaaggatgagtcaactccttaaaagctgtttgggctgttgtcaccattctatgtgagccttcagtctccccaaagagaaattttttgttgtcaggataaagtggtacatgaataaacaagatttccattaggcagcgtgccagtctcaagaaaattctggagaaaatggtgacaggatagacaattagatcacaggctgcctgcacatcaagtaaaaacaaaaatcctatgctaggcacacactattaaaaaacaaatcgctccaacccctaccatttcctcacagagattatagaatttttcttttgctgttgagaaattaataagaggcagaacaggatgccaaaactccaaagcatccaatataggccctcttctgggactcctgtcagctatatgttcaaaaattattgtcagtggctcatgcctgtaatcccagcaccttgggaggccgaggtggaaagattgcttaagctcatgagtttgaaaccatcctgggcaacatagcaagagttcatctctattttaaaaaattaaggccggtcgtggtgcctcacgcctgtaatcccagcattttgggaggcccaggcaagcggatcgcctgaatttgggagttggaggccaacctgaccaacatggagaaaccccgtgtctaataaaaatacaaattcagccagatgtggttgcgcatacctgtaatcccagctactcgggaggctgcggcaggagtacagcttgaactcgggaggcagaggttgcagtgagccgagatcatgccattgcactccagcatgggagaaaagagggaaacttcatgtcaaaaaaaaataaaaataaataagaaaagaaaaaaattaaggtcgtctcttgtgtactttttaaaatcaatggatagagtatagcaaagttaatttggatcttcaatggccatccttggggtcttttgagttccccaaacttgtctttcttaaaactaaactaggctgggcgcggtggctcacgccggtaatcccagaactttgggaagtcgaggcgggcagatcacgaggtcaggagattaagaccatcctggcttgcacggtgaaacctcgtctctactaaaaacacaaaaaattagctgggcatggtggcaggtgcctgtagtcccagctactctgggaggctgaggcaggagaatggtgtgaatccgggaggcggagcttgcagtgagcccagatccagccactgcactacagcctgccgacagagtgagaatccatcttaaaaaaaaaaaaaaagaaaagaaaagaaaagaaaaaagaaagaaatttctgcattacctatggatgttaaatctacttgagtagactttaattccaagtttgtgaatagcttttcttcaaaacatgctgaacttggtacaagagccagcaatttagggaaactatgtgcacttctgatcttgtccatttgataaatcacctgcctgtccccttgaggaccctactaagaaaactgcttaaaaacttttttttaaattttttctttttgagatgaagtctcactctgtcaccaggctggagtgcagtggtgcagtctcgactcactgaaacctccacctcctgggttcaagcaattatcctgcctcagcctcccgagtagctgggattacaggtgcccaccaccatgcccagctaattttttgtatttttagtagagacgaggtttcaccatgttggccaggctggtcttgaattcctgacctcaggaatccctgactctccaaatgtccccacttgttatgtcattcccactgacaaaacaaaaataatgctatcttgtgttaggctgttcttgcattgctataaagaatacatgagactgggtaatttataaagaaaaatgagtttaattggctcacagttctgcaggctttatgggaagcacggtgctggacatctgatcagcttctgatgaggtcgcaggaagcttaccatcatggcagaaggcaataggggagcaggcacgtcacatagcgaaagcaggaacgagagagagagtgggaggggaaggacgccacacacttttaaacaaccagctctcactatttcaaagacagcaccaaggggacggtgttaaaccattcctgagaaatgtgcccccatgatccaatcacctcccaccaagacccacctccaacactggggattacaattcaacatgaaattggggtggggacaaatatacaaactacatcacaccctttcactgctgaatctaatacctgtctctgtataggcaaaactgttgatattggcaaactttataatatacctcctataaaaatccagcttgatccatcaaaacccctgcctaatatcaaacaatatccacttaaaccagatggtgttataagtcattaaacctattacagaaggacataaaaagcaaggcctcattattccatgtactcatccttctaacaccctaattttacctattaaaaaccaaacaactgggattaaaggtttgctcaggaattctgagcaataaactatatagtgattccaagacatcagtggttccaaatccctatatctcattaaactcacaacctattgataggaggtttttcactgtcattgatctatgaagtgcattcttcagtaatccagtggatcaggccagccagtatctttttgcctttaccttggaaggccaacaattcacctggacagtaaagcctcttgcttttactgaaaacccttcctgtgtttttcaaatattaaaggaacacttggaggagatagtttctccttaaggttccaccttactacaatatatagatggccgccttctttgctctgcttcacagatagcctatgaaaaaaatggtgtacatctgttaaagcaactgactgctaaagatcatgaagtctctgacgaaaaactgcagctagtgaaaactcagaagaaatatttgggacacttaacttcagaaaatggattacatttagacccagattggcactttgtaatttcttcagtcaagaaccaagtgccacagaaaaacacagaatattataatgctgtatttgtggtgtgtaaactactcgtgtcttaagtagaaagcataaaaggtgaaccaataaaaaataataactacaagacttttcaacacatagacggtacaaggccagctgcagtggctcatgcctgtaatcccaggacattgagaggctgaagtgaacagatcatttgaactcaggagtttcagactagcctgggcaacatggcaaaacccagtctcttttaaaaaatggaaaaaattagctggttatggtggcacttgtctgtggtaccacctacttaggaggctgaggtgaaaggattgcttgtgcttcggaggcagaggttgcagtgagctgagattgtgacactgcactccaggctgggtgacacagtgagatcctcatctaaaaaaagacatagatggtataagaagatataaatagaaacaacaaaaagttaaaaagaaagaggatggagttaaagtgtgaattcttattacatatctttcggtttttgtttatacaagcagtgttaagtttttatcagattaaaataatggttataagatatctgcaagcagcctggtgatctcaaatcataaaaaatgcaacagatatacaaaaaataaacaacaggaaattaaatcatatcaccagagaatcaccttcactaaaaggaagacataaaggaaggaaagaaggaagagaaaacaagcaaaacaacgagaaaacaaataagaaaatgtccttctttatcaataataacactgaatgtaaatggtctaaactctccaatcaaaagaaatggagtggtggaatgaataaaaaaaaaaaataaaaaaaaaaaaaaaacaaaggacccaatgatctgttgcctacaagaaacacactcacctataaacacacacatagactgaaaataaagggatggaaaaagattggtcatgccaatggaaatcaaaaaagtgcaggagtagctatacctatatcagacaaaatagattttaagataaaaactataagaagagacaaagaaggtcactatataatgataaaggggtcaattcagtaagatgctataacaactataaatatacataccccaacactggagcacccagctgtataaagcaattattattagagctaaagagagagatagatctcagtacaatcatagccagagacttcagcagcccccgtttcagcataggacagatcgttcagacagaaaagcaccaaagaaacattggacttgatctgcactatacattaaatggatctaatagatatttacagcatatttcatccaagagctgcagaatacacatatttcttctcaggacatggatcattctcaaagacaggccaaatatttggtcacaaaacaagtcttagaacattcaaaaaattgaaataatatcaaacatcttctctgacaacaatggaatagaactggaaattaataacaagaggaattttggaaactatacaaacacatagaaattaaacaatatgctcctgaatgcctggtgggtcaatgaagacattaggaaagaaatttaaaaattttttagggagaggggtggagcaagatggctagatagaagacttcactaaccgtccccctgcaacaaagataccaatctaacaactatctacatttaaaaaaagacaaaatcaccttcactagaaacaaaagttatgtgagcattcacaaaacctggtttttaacttcatataactgaaagaaacactgagaagggtaggatgttgtcccgaattgccaatgccgccccagccccatcctccagcagcagccctgcagtgtggagaatcatgcacttgggagagggagaacacagcgattgtgacacattgcgttgaactcagtggtgccctgatatagagttatattggaagaatggagcaatgagtttggtggttggggtggggaaacagggaggaaaggaatgaaacaaacactcgagggtagaagatggtaccagtctgagaatcaggtgccagttcttttctactgtgtgtctagtcacattggtgtagacgtccaggcaggaggagaagcaagttgtaggatcagctacatctgggcttccaaaggtaatctcaggtgccacctctcctccatacttactaggaatcccaggcccttccctgcagtgacaccatcctgcatcctttgtaccctgctttccacttcttctcacagcctttccctccctccctccttcattctcctggccaggacccacactcaccccacctaacctctctcttttgatcagtcccatagtttagaaaagaacagaaatgccagctgtggtcaggtgttttaaaaatttattcagtgctctctgggcatgcatttcaggacaataacattgtttctggtctcaatgcactttcaccacatctgattttcaactatgtgagttaggacacctatatggtcaatcaatcaaccagggaaagaaactaaggtccagagccctaaggatgcttgcccaaatcaccctgattttggcagaacaggatcttccaagggccttaagagtcagagaagaccgcagccccttgtgttgtattctgctgcatgccggggaaactggatggaaacgattcagattcttcctgcatgaaaaggacaacctgtgtccttgggaatcctccagtggccccagttgttcctgctgggtgtgacatcgatgcccgaatccaaccctgtaaaatagggtgaaattcagatattgcaagtcatgaaaaattttctcctgatagcaaagttgaaggataacaaaactgaaggagggaacataccaaacagaggaggaaggaatatacaaaaaataacaacaacaacaacatcaaccaacaacaagaacaaaaaaaataccaagatatgggatgtatgaaatcaggcatcaacccatgaaaaggtgaaagggcaacaggaccagaaaggaagagggtcacctgggtgggtggacagcagaggggaagccatctccaagaagatgaccttgacaacagccaacataagtttaaaggtattgagaagacatttactcaactaaggaacagttggtgaattcatttaaggttcacggaaagtaagaaaatgaaaatactaggcaatgatcaaatcttgaaaacttcagcatgtgtggaaagaaaaactaagagagtttaccatgtggctcaggtctgagtagcattcacgtaagtcagtaattttaactctggctctcaatgcactcaaaatctccacctgcctacacgaggaggatgaaaatgtgtgtgctggggaaggtactatggacagaagggatattgaaaagtcaatacataatatctaaaatggaaacatttgaagtggcataaatgtatattatcaagagacataaagataaagaacaaaatatgaagtaaaaggcttccatgtggttgcttgccaggaagctggtggctaggaaggattgagagagagtagaggggagaccatgttttgtaacaggggaaatgaaagggaagcaggtagcacctggagcctgcctcatgcagagaacagggttccacgcagtggtccaggatctcagggatttactgtggctgaggccacctgtccccaggacaagcccttggcactgagtctactgaaatgtgaggagggagaagaggaggccttcagatatttgacctgagcagcctggcttactctagactctgtcttggctcctggccagagattaatgtagcaaattgtctctaaattcatccaagggagtggagttccttcccctactccttatccccttccacaccatcctttctggaagtgttattgtgaacatgttctcggatttgtttttatcagtggagaaacagaagacagaagagcactcacccagcagagccagagggaggcagttccaaagactccagtggccaccagagcccaccaggacccagggctggaggtgcacagtgagatcctcagcgcagagggagaaatctcctaagagtaggaaggaataacagaattaggaagcgtttccttacttcacagtgagtgcaaacatgatgggaaggcatagagaaaaagtaagaaattatagggaaacgtgcttatttagggggaggcgatactgcgggaggggtacaccagacccagcactgccgtggggtaggagaaacaggtataacccttgactagagaatggatacttgaggatcagtatagtcactagatgaagaggactacatacattttaaggacattgatgtacattatagtgtatcattggaagttaagggaaaagaaaagaaacttcataaataaaaacaggctgcatgtggtaaaatcaataatcagccctgggacttgtgttttcaaaacgctttatccaggtgtgacacctctgacatcctggattccccaccctctagcacccagttccctctcctgtaatgagaccagggtcaggaggagagatggacagatgggcccatgctgaaggcagtcagtcacctgtgcctgcagatgagaaaccgccgcctaacctttctgaacctcatgcggaaaaaatgtttgcaccactagcctccagcacagagattccatcccagctcagtatttagtatttagagatttagtatttagtatttagagattcctaaataccgaggactctgcccagtctggtttgaccatgctcctccttcctcacactgtggggccccagctttccctcccaattccacacccccagatgctggtaccatgctcaggttcatcgtggacaccactccatccgacatggcaacacttttgatccagccgctttgacaacctcgttcagtctcctctggagacagccacccagacctttgctgatgagctgggactgaggggaaaaggcctgcgatctctgatggggttggcaatggacaccaaagtcgtcttctaaagaccaagtacgctctaaccacggaaatcgtctctaaccactgactcctccagaaaaggaagaaagaagcctctctacactaagctgaaacactaaatacactaagtgttgattaagtagactaggtacactaagtggtaaacttggtaaacttagagcactaagtacactaagtacaataaatggtaaacttggtaaacttagagcactaagtgcactaagttcactaagtaataatattagtactaagtggtacactaagctgaaaccgcaaaccgcagccatggcagaggaacctcagcttaaatagtgtggagcggccactggtttccgcggctcgtagtcgcgcccgcgaggaaacgccagggaggcttcctgccccgcccagcggtggcccagggcacagggaaccacggctgcttctctccgaggtttgtggcctgagaaactctccgctgcgaatctgggctggcctctccgggaagccttgaaactcaactcccgggtgggccaggaaggctgcccgacttgggcagcgccggccggagccttcttcaaagccgagctgttcgccgccctcgaggcccaggcgagcctggaggagggaccgggtgcgctcagatggggcccttggtgactggcgaccccatgagcacccaccctccagcctggggcgggatggcccaatcgggcgctgtgggggtccgtttggaaaccgctctctgctttgaggatacgcggggagcttccctggaagctgtgaagaggggcagacacgaggcctctggccagccgcgcctcgggtccaggcctccctgtgtccacatctggtctcccggcttttcacaacagtgaccttgacagcgcccagagtccgctgcttccgtccagtccgctcttcccctacgtggccaagaggacgcagcactggcggcttcaggaggtggctgtgagcgtggggctggggccaagagcagaggaccagagaggagtctccaagccaccaccggccccgtcaccggctaccggctaggtcaggccccagattcgggtttgcccagcaggcgctcggcgtccacgctccctctccaccttcttgcctctctaaggaggacctggcccactaggaagcccggggcgttctgtgaactgggtggtcaaacacggtgtgtggggaaggggccaattgagattagacgtgaaaaaccgggaacctggggaccgcagggttggggcccaggaggggcccgaagcttccatctaagacaggtgactaagtgaggggcacaggtgcaacagaaagaaagactgatttgcaattgacttgtaggtgtaatcggttttagtccctatttgaccaccagaggtctgcagctctatccttggtgagttctgaaggcccctggggagagctgagcccaagagactttttaattccacagaagaacttcgcctgaggcaggtctcctctgtgcccagggaaggaaggctggacgtgatggtttctgaaaaaagttacacagagaaaaggtcaagtccatttttgctatcctgtactgaacacagatcaattaactggtcccaggattgatagcaacgggcctataactggtctcctggttcctatccagcccttcccccataaaggcagaatcctgtcctcttggaacagtgaatccccagcagaggacctcagctcccaagctccattcagcctgggctccctggaacctgctaccctgcccaggagctgtcaacacctggagtgcagtgcaggaagaatgcaggggcgcttgatggggaggtgagtgagtgcagatggggttcctggaactccttgggcccttggggtagctcccactcaggctgtcctgcaggtcctcacaaggcccactactgagcaggaagaatgtccccaggagaggcaagaggtggggcaagggcgagtatggggtcccttgcatttgcggcaaaatggagagggagatgagaggcaaggagtactggccctcacatggaaacctatagcacactgcccaaagggaatgggaagggaaacacagccacgcacgtccacagaagacttggcagatgggagagggtagctttgaggactgaaatccctacttcacaggactctggatacttggacacttgcttcctcctgtgcttctgtacgaatctcaggactgtgggacactctctgcactcttattcttgtaattctcttctctccggatggcctcctttcccttggagtgcagcagtggccatcagattcttgggctgaaggtcactgggtgactgtgggattctggggccagttacttccctttcttagccaccccatgctttacagaactgagctccacagtcatactcatctctcccagtgaagctcaaaggaattattaataaaaaacacaaaaacataaatggaatgatgtttatggaaccaattgattaacgtggaaaagtatgggcttcccagttttctgcccttcgtgagaacttaatcctgaaacactgatctcatgtcaaccttctgccttaactgggaattcctgtggccagtctgttctaagggtatcccgtgagcccctagggatggagaacagaaggccacttttcctaaacacacacgtggttctgtcctggccagatcagtggacttccagtgtccttcctgagtcacaccgaggtgaattgcatagaccagaaacccacattttaaaaagaataaaataaaataagtggcctgtagtgtgggggctggggttggtgcgggcttccggcttggccgcgggtgtctgcatcgttcagccccggggcttttgtgtcgggtctggcctggctttctgtccgcaagtttttgccctgctccgcggcgctcctccggggcgggagccgcgaggcccgggcgagctcgggcgggaccggaggctgcgaaggctgccgggagcgggactcgcagctcctggatatgccagcgttcctggaagactcctgggtcctgacgaaagacaagttgatgagtgagttggtcgccattaaagtgaggctcccggcccggagcagcgcagagaccaggacgcgcagcctcgcctgcagcactcggccctacctctaccccgccgctacctctaccccgccgcggcgccgacagcgagggccccgcctcccccagctggctccagagccaagccacccacagcaggaaagccacgaagaaaacagttcaactcagaccaaaagataaagctgatctcgaggtaaccgcgctcactaatgaagatctcgtggacccgcttgcgaggtataaagagaaacctagtcctactggagaacaaccaggaagcgatgtgagaaaaaaaccttgaaaccgaaggaacgaggacgatctgtcgcccaggctggcgtgcagtggcgcgatctcggctctcggctcactgcggcctccgcctcccgggttcaagagattctcgtgcctcagactcctgagtggctagaaccacaggcatgcgccacctcgcctggctacatttttttttttttttttttttttttttttgtatttttggtagggacgggctttccccgtgttgtccaggctggtctccaactcctgagctcaagggatctgcccatctcggcggattaacaatttaatcttcagcagaaaatggaaggcagaattgaaataaaggttctaatagatactgtgacaatgaagaagactaaagtaaagatcaagcttgagaagacagaaccactaaagggcagagcaaagactccagtaacactgaagaaaagaagacttgagatagtcagagctattctcacgctggaataactgaggctgaacgcacaagtggagcttcagaaggcggagctctgcaggcctggagtagggagtctaccagagaccggaggagaaggccaaggaagagggtggaaaccagaacattttccaatagacagtgcagtaatttcagagagtgctcccacagctgaaactctaatggcttcaggacacaaaaccttcgttgtcagtaggatgactggaaatttcaagcatgcagctcctattctgcaactcagtaaattttcaaacataccccaaactccaaagagaccactggggttgggggggaacagaataaagaagagtagaaagggatattcttaaggaaatgttgccctatgaagcatctacaccaacaggaattgctgcagaccagtcaaaggggctacaggcaggccattagaactcactgagttcaggatggcagaatctttttcatctaaatatgttcctaagtgtgttcccttggcagatgtcaagtcagaaaagacaaaaaaagaatgagccatttctgtatggacaaaaattttgctgtttgttgttgtagtaggttttgtttgtttgttttttggtctatcaagctatagaaaccaaacaaggaaatcttttctctaacgttcttcctgatgactctagaaacccaactgaatggaatccatctggcacattcaagttggtctcctatttttaataactgtattgaaaaacacttgtgtacccttgttgacttaaatagctaaaaaaaaaaaacaggtgatttcacctcaataaatgtagtattccatgaaaagcaaacaaaatatatataaatgaacttcattagagtgtttttgaactctggactagcaggagatcacttcatgccatatgaaaatcttttatagctctgaaacttttttgtaggctttttaaaattttttcttctcattgtccaaacccatgcagggtttctttaaaatgtggacacctggtttcctttttgaaaaatgagatatatatatatatatatacacacacacacacatatatatacatatatacacatatatatacatatatacacacatatacatatatacacatatatacatatatacacatatatacatatatacatatatacacatatacatatatacacatatatacatatatatacatatatatacatatatacatatatatacgtatatatacgtatatatatgaaacaagaagggaaaaacatggtaatatagtatgaagttacacatttaaatactttgaattcttacagaaaagagtggaagaattatcttctactgaataaaaactttacagacatggaagacaatgaaatttggtaagagaaaaagtaacatggttgtactttttgtaactgcaacgaaatttgatggtgtttatgaggaaaactacagcaataatctcttctgtaacttttattaatagtaatgttagactcagaaatggtggcctccatgttcttccgcccgctgttggtggccgccacccttcggaccacactgcgggctgctgctcaggttctgggaagttctggattgtttaataaccatggactccaagtacagcagcaacagcaaaggaatctctcactacatgaatacatgagtatggaattattgcaagaaactggtgtctctgttcccaaaggatatgtggcaaagtgaccagatgaagcttatgcaattgccaaaaaattaggttcaaaagatgttgtgatgaaggcacaggttttagctggtggtagaggaaaaggaacatttgaaagtggcctcaaaggaggagtgaagatggttttctctccagaagaagcaaaagctgttccttcacaaatgattaggaaacagttgtttaccaagcaaatgggagaaaagggcagaatatgcaatcaggtattggtctgtgagtgaaaatatcccaagagagagtgctactttgcaataacaatggaaaggtcatttcaaggtcttgtattaataggaagtttacatagtggggccaacattgaagatgttgctgctgagactcctgaagcaataattaaagtacctattgatattgtagaaggtatcaaagaggaataagctctccagcttgcacagaagatgggatttccatctaatattgtggcttcagcagcagaaaacatgatcaagctttacagcctttttctgaaatacgatgcaaccatgatagaaataaattcaatggtggaagattcagatggagctgcattgtgtaaggatgcaaagatcaattttgactctaattcagcctatcgccaaaagaaaatgtttgatctacaggactggacccaggaagatgaaaggaacaaagatgctgctaaggcagatctcaactacactggcctcgatggaagtataggctgcctagtaaatggtgctggtttggctatggccacaatggatataataaaacttcatggagagactccagctaatttccttgttggtggtggtgctacagtccatcaagtaacagaagcatttaagcctatcacttcagataaaaaggtactggctattctggtcaacatttgtggaggaatcatgcactgtgatattacagcaaagggtatagtcatggcagtaaaaagtttggaaattaaaatacctgttgtggtacagttacaaggtacacaagttgatgatgttaaggcactaaaagcagacagtggacttaaaatacttgcttgtgatgatttggtggaagctgctagagtgcttgtaaagctctctgaaatagtgaagcaaagcaagcgcatgtggatgtgaaatttcaattgccaatatgatctgaaaacccagtgatggctgaaggtgttaaatgtgctacaatcattaaggatactgtgttctgtgttattgttcttttaagtgtgtggagattgtagttgccatctaggcacacaaacatttaaaagcatttggtttgcatttaattctaccattcagaatggactgtttgtaagaagcatgtataatgcaaatatcttctttatttcgtcacagccagtcttttttgcttctacaaaatgcaacttgcaatatgacagtttattattgttggatacaaagttcttcattgataagagacctacaaataaaataaatatgaagataaagctttattcttcagtgttaacatacagtatatctaataactagcctcattagtagaccagtatattaaaacactgttttatgtaaaaagtgtttatcttcagcaccaaatacataataaatgtaacaatcactatttataaacagagctttcaaacactcctcagaaaatcaaaatacttctaagtattttgatgaagtaactttgtaattatgtgaacattgttttaatcattaggaaacgctgataactgcaagaattcatgattccatggtattaagaagcacctgtaggtttgtttcaaatagaggcatattaaccaagggaaaaaaatagtaatgttattattgtagccctatcatattcactttttaaacgactggcttttaaaagtatcatgaaagtcctacttcagtaaaacccatttaagtacagttgatgtttagcagggatcttttagtgcagcataaacatgctttagagaactgttggctggctgtacatgtttttaaaagctgttagctagctatgaggctacagctgaaaattacactttttatgagaaattgtaaacactggtcttatgtttcatctggattccttattgcatcatcttctgttaacaaaaacaaattttcccagtttttttgccttgtatttcccagcacaatttcatttaaaagtacaaaaagtgtttgctctcaaattgcatcataagcaagtgttaatactctgggcttttttatgtttgtttgtttgtttgttttttgagatggagtctcgctctattgcccaggctggagtgcagtggtgctatctcggctcactgcaagctcggcctcccgggttcacgccattctcctgactcagcctcccaagtagctgggactacaggcgcccaccactacgcccggctaattttttgtatttttagtagagacggggtttcaccgttttagccgggatggtctcgatctcctgacctcgtgatccgcccgcctcggcctcccaaagtgctgggattacaggcgtgagccaccgcgcccggcctgaaggacacccttagagaagtgcaaaatactatggcaggtttcaacaatagaatcaaacaactagaagaaagaacttcagagctctaagacaaggctttcaaattaactctgacaaaaacaaagaaaaaagaatcaaatgaacaaagcctccaagaagtttgggatcatgttaaatgaccaaacttaagaataattgatgttcctgaggaagaagagaaatctgcaagtttgaaaattttatttgagggaataattgaggaaaacttccctggccttgctacagatttggacattcaaatacaagaagctcaaagaacacctgggaaattcatctcaaaaagatcatcacctagacacatagtcatcaggttatctagggtcaagatgaaggaaagaatcttaagagttgtgaggcaaaggcatcaagtaacctgtaaaggaaaacctatcggattaacagcagatttatcagcagaaaccctacaagctagaagggattggggtccaatctttagacacttaaacaaaataattatcaacccagaattttgtatccagtaaaagtgatgaaggaaaagataaagtatttttctttttttttttttttgggacggagtcttgctgtcacccaggctggggtgcagtggcacaatctcagctcactgcaagctccgcctcctgggttcatgccattctcctgcctcagcctcccaagtaactgggactgcaggcgcccaccaccacgcccagctaattttttgtatttttagtagagatggggtttcatcatgttagccaggatgctctccatctcctgacctcatgatccgcctgcctcagcctcccaaagtgctaggattacaggcatgagccactgtgcccagcggaaagataaagtatttttcatacaaacaaatgctgagagaatttgccactaacaagccagcactataagaactactaaaagatgttctaaatcttgaaccaaaatcttgaaatataccaaaatgtgacctgcttaaagcataaatctcacagggcctataaaataatcacactacaaaaaaaaaaaaaaggtatttaggcaacaactagcataatgaatagaatagtacctcacatctcaatactaacactcaatgtaaatggcctaaatgctccacttgaaagatatggaattgcaaaatggataagaattccccaactaagtatttgctgtcttcaagagactcacctaacacataaggacacatacaaacttaagataaagtgatggaaaaagatgttccatgcaaatgggcactaaaagcaaacaggagtagctattcttctatcagaaaaaatagactttaaagcaacaacagtttaaaaagacaaagagggacattatataatgacaaaaggactagtctgacaggaaaatatcacaatcctaaatatatgtgcacctaatactggagctcctaaatttataaaacaattactactagacttaagaaatgagatagatggcaacacaacaatagtgggggatgttaatactctactgacagcactagacaggtcatcaagatagaaagtcaacaaagaaacaatggacttaaactctaccctagaacaaatggatttaacagatatttatagaacactccacccaacaactgcagaatgtacattctattcattagcacatggaacattctccaagataaatcatatgataggccacaaaacaagtcttaacaaatttgagaaaattgaaattatgtcaggtactctctcagaccacagtggaataaaattggaaatcaacaccaaaaggagccctcaaaaccatgcacatacgtggaaattaagtaacctgctcctgaatgatcaatggatcaacaatacaatcaagatggaaatacaaaaattctttgaactggcctgtgtggtggctcaatcctgtaatccccacactttgggaggccaaggtgggtggatcacctgaggtcagggatttgagagcagcctgactgatatggtgaaaccttgtctatactaaaaatacaaaaattagcttggtgtggtggtgggtacctgtagtcccagctactcaggaggctgagacaggagaattgctttgcttgaacccgggaggtagagattgcagtgaggcgagatggtgccactgcactctagcctgggtgacagagcaagactctgtctccaaaaaaaaaaaaaaaaaaaattccttgaattgaatgattatagtgaccgaacctatcaaaacctctgggatacagaaaaagcagtgctaagaggaaagttcatagcattaaatgcctacatcaaaaagtctgaaagagcacaaataaacaatctagggtcgcacctccaggaactagagaaacaagaacaaaccaaacccaaatgagcagaagaaaaaaaaataacctagatcggagcaaaactaaatgaaattgaaacaaaaaattacaaaagataaatgaaacaaaaagctggttgtttgaaaagataaatcaaattgatagacaattagtaagattaaccaagaaaagaaggaagaagattcaaataagctcaattagaaacaaaacagaagatattacaaccaataccacagaaatacaaaagatcattcaaggctactatgaacacctttatgcacataaactagaaaacctagaggacatggataaattcctgaaaatatacaaccctcctagattaaaccaggaagaaatggaaaccctgaacaggccaataacaagcagtgagattgaaatggtaatttaggctctacctctccccctccccctccccctccccctccctctccctctccccacagtctccctctccctctctttccacggtctccctctgatgccgagccgaagctggactgtactgctgccatctcggctcactgcaacctccctgcctgattctcctgcctcagcctgccgagtgcctgcaattgcaggcgcgcgccgccacgcctgactagttttcgtatttttttggtggagacggggtttcgctgtgttggccgggctggtctccagctcctaaccgcgagtgatctgccagcctcggcctcccaaggtgccaggattgcagacagagtctcgttcactcagtgctcaatggtgcccaggctggagtgcagtggcgtgatctcggctcgctacaacctccacctcccagccgcctgccctggcctcccaaagtgctgagattgcagcctctgcccggccgccaccccatctgggaagtgaggagtgtctctgcctggccgtccatcgtctgggatgtgaggagcccctctgcctggctgcccagtctggaaagtgaggagcgtctctgcccggccgccatcccatctaggaagcgaggagcgcctcttcccggcctccatccccatctaggaagtgaggagcgtctctgcccggctgcccatcgtctgagatgtggggagcacctctgccccgccgccccgtctgggatgtgaggagcgcctctgccctgccgcgaccccgtctgggaggtgaggagcgtctctgcccggccgccccgtctgagaagtgaggagaccctctgcctggcagccgccccgtctgggaagtgaggagcgtctccgcccggcagccaccctgtctgggagggaggtgggggtcagcccccgccaagccagccgccccatccaggagggaggtgggggtgtcagccccccgcccggccagccgccccctccgggagggaggtgaggggctcctctgcctggccgcccctaatgggaagtgaggagtccctctgcccggccaccaccccgtctgggaggtgtacccaacagctcattgagaacgggccaggatgacaatcgcggttttgtggaatagaaagaggggaaaggtggggaaaagattgagaaatcggatggttgccgtgtctgtgtagaaagaagtagacatgggagacttttcattttgttctgtactaagaaaaattcttctgccttgggatcctgttgatctgtgaccttacccccaaccctgtgctctctgaaacatgtgctgtgtccactcagggttaaatggattaagggtggtgcaagatgtgctttgttaaacagatgcttgaaggcagcatgctcgttaagagtcatcaccactccctaatctcaagtacccagggacacaaacactgcggaaggccgcagagtcctctgcctaggaataccagagacctttgttcacttgtttatctgctgaccttccctccactattgtcctatgaccctgccaaatccccctctgtgagaaacacccaagaatgatcaattaaaaaaaaaaaaaaaatggtaatttaaaaaattaccggccgggcgcagtggctcacgcctgtagtcccagcactttgggaggcctaggcgggcagatcacctgaggtcgggagtttgagaccagcctgaccaacatggagaaactccgtctcttctaaaaatacaaaaaaattagccaggggtggtggtacatgcctggaatcccagctactcgggaggctgaggcaggagaatcacttgaacccaggaagtggaggttgcagtgagcagagaccgtgctattgcactccagcctgggcgacaagagtgaaactccacctcaaagaaaaaaaaaaaggtaccaacaacaaaaaaaagcccagaaccagatggatgcacagcggaattctatcagacattcaaaaaatggtacctataccactgacactattccaaaaggtagagaaagagggaatcccctctaaatcattctatgaaaccagtatcaccctaataccaaaaccaggagaggacataacaaaaaaaaaacaaaactacaggccaatatacctaatgagcatagatgcaaaaatcctcaaaacatactagtggccgggtgtggtggctcacacctgtaatcccagcactttgggaggccaaggtgggctgatcacttgaggccaggagttcaagaccagcctgaccaacatggagaaaccccatctctactaaaaatacaaaattagctgggcgtagtggtgcatgcctgtagtcccagctacttgggaggctgaggcaggagaatcgcttgagcccaagaggcggaggttggggtgagccgagatctcgccattgcattccagcctgggcaacaagagcgaaactccgtctggaaaaaaaaaaaaatgctagctaacagaatccaacagcatatcaaaacaataatccaccatgatcaagtgggtttcctaccagatatgcaaggatggtttaacatatgaaagtcaataaatgtaatacaccacataaacagaattaaaaacaaaaatcacatgatcatctcaatagatgcagaaaaatcatttcacaaaatccagcatccctttatgattaaaaccctcagcagggttgggcatggtggctaacgcctttaatcccagcactttggaagactgaggggggtggatcacgaggtcaggagatcaagaccatactggctaacgtggtgaaaccccgtctctacaaaaaaaatacaaaaaattagccgggcgtggtggtgggcgcctctagtctcagctacttgggaggctgaggcaggagaatggcgtgaacccaggaggcgggtgagcggagatcgtgccactgcatccagcctgggccacagagcgagactccatctcaaaaaaaaaaaaaaaaaaaaccctcagcaaaatcagcatagaagggacataccttaaggaaataaaaggcatctatgacaaacccagagccaacattatactgaacgggggaaagttgaaaccattcccgctgagaactgggacaagtcaaggattcccactttcaccacttctattcaacatagtactggaagtcctaaccagagcaatcagacaagagaaagaaataaagtgcatctaaattggtcataaggaagtcaaactgtcgttgtttgctgatgacatgattgtatacctagaaaaccctaaggactcatccaaaagtctcctagaatgggtgaacaaattcagcagtttcacgatacaaaattattgtacaaaatcagtacctctgctatacaccaacagccaccaagctgagaatcaaatcaagaactcaaccccttttactttagctgtgacaaaaataaagtacctaggaatatacttaaccaaggaggtgaaagatctctacaaggaaaactacaaaacactgctgaaagtaatcacagatgacacagacaaatggaaacacatcccatgctcatgaatgggttgaatcaatattgtgaaaatgaccatactgccaaaaaaaaactacaaattcaatgcaattttcatcaaaataccatcatcattcttcacagaactagaaaaaataatcctaaaattcatatggaacaaaaaaagaccctgcatagccaaagtaagactaaccaaaaagaacaaatctggaggcattacattacccaacttcaaactatactataaggctgcagtcaccaaaacagcatggtactggtataaaaataggcctatagaccaatggaacagaatagaggacccagaaataaaaccaagtacttatagtcaaccgaacttcaacaaagcaaacaaaaacataaactggggagaggacaccgtattcaacaaatggtcctgggttaattggcaggccatatatagaagaatgaaaccggattctcttctctcatcctatacaaaaatcaactcaaggtggatcaaagacttaaatctaagacatgaaaccataaaaattttaaaagacaacataaaaaaataaccttctagacattgccttaggcaaagacttcatgaccaggaacccaaaagcaaatgcaacaaaaacaaagataaatagatgggatttaattagactaaaagcctctgcacagcaaagaaacaatcagcagggtaaacagacaacacacagagtgaaagaaaatctttgatctacacatccgacaaaggactaatatccaaaatctacaaagaattcaaacaaatcagaaagaacaaaacaaacaatcccatcaaaaaacgcactaaggacatgaatagaaaattctcaaaagaaatatacaaatagccaacaaacatatgaaaaaaatgcccaacatcactaatgatcagggaaaggcaaatcaaaaccacaatgcaataacacctcactcctgcaagaatgaccataatcaaaataccaaaaaaaaaatagatgttggcatggatgtgacgaaaagggaacacttttacactgctggtgggaatgtaaactagtacaacaattacggaaaacagtatggagaatccttaaataactaaaagtagatctactgtttgatccatcaatcccaccattggatatctacccagaggaaaagaagtcattatacaaagaagatgcctgcatatacatgttaataacagcacaatttgcaattgcaaaaatatggaaccagcccaaatgcccataaatcatcgaaaggataaagaaaatgatgtatatgtataccgtggaatactattgagccataaaaaggaatgaaataatggcattcgcagcaacctggatggaaatggagaccattattctaagtgaagtaactcaggaatggaaaaccaaacatggtatgtcctcactcataaatggtagctaagctatgaggatgcaaaggcataagaatgataaaatggactttgaggactcaggggaagaggggtagggaggtgagagataaaagactacacattgggtactttgtatgctgctcaagtgatgggtgcaccaaaatctcagaaatcaacactgaagaacttattcatgtaaccaaacaccacctgttctcccaaaaacctattgaaataaaaaaaaataaaaaacaaaacaaccccacccccaaaaaaagaaataaagaagacataaataagggcggagaaatactatgttcaaagattggaatattcagtattgttgaggtaccaagtctcccacaactgacctgtggattaagtgcaattccaatcaaaatcatggcagggctgaacctaaaagtttaaaaaaataaaaaataaaaataaatcctggcaggttttttttaaaaagaaattaccaagctgatttgtcaatttatatggaaatctgaaggactttgaatatccacaataatttttaaaaagaagaaacttggaaaatacacactacctgattacaagacttactataaagctccaggaatcaaggttgtgttactggcataaggatagccatgaatcggtggaatagaataaagagtagatgaataaaaccacacatatatgtctctgaaaaatgctttaaggggaaaggatagtgttttcaacaaatggtgctggaaaaaaaaatgacaagaaataagaggaacaccatatccaaaaactcatttgatataaatcatagatataaacataagagctaaagttgccagccttctaaaacagtgctacgcaataggctataatatgagtcacaaatgtgagccacatcggtaatctttaattttctggtagccacattttaaaaagtaaaaagtaatcaatgaaattatttttaacaatgttttatttaacccaatacatccaaaatataattttagcatggaatcagtataaaagattattggcatatttaacatttttttctcatacttagtctttcttgaaattattccttagagcctccagggcttagaaattccttaattttacatcctgccatgtcaagatttcttccagttccggggattctaggatttgcagaagacatcagtaccacttacatttccaactctgggtcccggaaagaaagagtacagagacacagtcgaggctggcacccaccttagcctcctcctctcccagccttcctccacacaccaggcaactcaccctgccggcaagctcggggtttcatgaagtgccaggcactggtgggaagtggtcaggagataacacaaaccctgatctccgcaaccagcctcaggaagtccttctgaaacctacccagccccattcctgccgcagcctgggtgctttccccggcggagccacacgtctgcagagggtgattctagaacacccttcctcccaataacccagggcttcctccttcatctgcttcaggactcagctcgcatggcacctctcgggaaatctcactctcatgataataacttcaaattgcacctggctcctttcatcttccgtgccttgcttttctcttaatcatcctttattttcggacacccctgtagttgacttcagtgactttttattggccacgtctttcaaccgaaggtaaattccttgagagccatgatttgtgcctgtttggatttgacccaagcgcctagaatagcgcctgacgaaaagtagatgctcaaccaacagttaggggctgaataaatctagagaccagaacctcttaaagttgagtctggggctgacaggtcggtattttcccaatatatgatttttgaggtccacaggggagcggtggggagaggcttacccagggtggtgagcgcagcctcagtggcagaaatccccgtgcgccccctcctgccgcagaggaagacagacccctacggagcctccagggcgcagtctccagggcggagtcccggggcgcttcgggcagggagtctgggccaaagcgccaaaatccgccgctgtcgctcagctgcagcacgtttcgcgctggggagcctctcctggtgggcgaccgtcatggacaatcgacaagaccagaaattagatttgagtccagaatcaaggacctttaagcagggattggagatggcagggggccaggattaagggatatagacagcaggtcctgtctgcttaggttgcaaatgggaagaagaggccggatgccagggtcctggactctcagggttcgggtggggccagaatcctggactctcaaggctggggaggggccgccctccaggatccaatagggtataggttcagatgcctgggtcctggaggtccgggtagtggcggaggaaccgccctcgggttcccgatggattggggacaaatgctcagcccagtctgattccagaaatccttgtaacccaatatagtctccagctccgatgccatgtccttcccgggtcccaacgtgctggggctggagactcatctaggggattccggggaggagggatcttcctctctggaagcagcagaacaaatttcagggactcaggagtccaaggcctcattccaaaaacactgagaggctgcgtactgggagcacagtatgtctgtggggtccacccagacctgggaaccaggtcttagggcctgcagacctccctctgccttgaggtcagagtccactgccactaactgggaggaaacacctgtcgcgggacggggtcgcccgcatgtgcacagagccctgttctgccgagatccgaaggggaacctggggaggtcccagatggggaagggacaggagagctgggtgtctctcctcagtccttcggccacacggggccgctgccgctctacgcttgggttctgatgagctgctctggagaggacggggcggtggtctgagtaagacacagattgttgatccagaaaggatgtatcaatgaggtggggctggggttgtccagggggtggaaaggccttctgagaagccctggactgcgcggggttccggctctgcggaacagaggagggctctggagctgcctgtctctgaggtttccaactcctccttgcaaaccctccctccagccttttcatggcaacactccaggaaaatggaaagttgatcatttttttcttccactccttaatcctttcctgactgctacttttagataattttattttagaagagttttaaatttacataaaagttgcaatggtagtacagagttgccatccgctccacagtcagtttcccctgatgttaacatctctcattactatggtccatttgtcacagctaatgaagccattttcataccttattattactaaactgcagactttatttggagttcattagcgttcccctaatgtcctttctgtgtttcaggattccatggagaatatcacactacatttagtctctgtcgtgcctccacggcatcctctggtctgtgacaattcctgagattttcctaatttttgatgcctttcacaatatcgggaagtactgaccagatatattgtaaaatatccctcaaactgaatttagttggggtgtagatcatggttagactatggttatggatgtttagatgaggtgaagtgctgttctccaaacacattatcaagattatatcaatttgatgtaccactgttgatgttgaagttgaccatccatatttttacttcctgtagctgccacaaaaatgccctcaaagttggcaacttacaacaacagaaaattattctttcacagttctggaggcccagggcattggtcagcgttctttggcttgtagccccattgctccagtctctgcctccttcttcacattgccttctcctcttctgactctctcttctgtgtacctgttaggaagacacttttcattggatttagggcccacctaggtcatccaggaggatctcctcatttcaatatcctcagcttaattacatctgcaaagaccctttttttccaaacaacttgaaattcacagcttctggggactaggacagaaacatatctttgtggggacaaccattcaacccactacatctggctaagctaatatttcccagagtggcaatccaccagtgcaccccaggttacaatcctcattctaattcccaaataaactcaacatatttggacatttctttaatgtctttttttttttaggttgaaaaatctggtatcagaagtgatcctgaagaaagattacctttggaagagacttatgctgagttcattgcttgatttcttgcctctgtttctgaacatcttttgagagcaaaatttactttctaaaaagatgggtatgtgtcgaccctttaaaagctgtttgggctattgtcgccattcaatgagaaacttcagtctccccaaagagaaattatctgttgtcaggataaactggtacatgaataaacaaaattgccattaggggtcgcaccagtctcaagaaaaatctggagaaaatggtcacaggatggacaattagatcacaggctgcccactaagtaaaaacaaaaatcctatactaggcacactattaaaaaacaaatcgctccagcctctaccatttcctcacagggattatggaatttttcttttgctgtcgagaaattaataagaggcagaacaggatgccaaaattccaaagcatccaatataggccgtcttctgggactcctgtcagctatatggtcaaaatttatggtcggtggctcatgcctataatcccagcaccttgggagaccaaggtggaaggatcacttgagctcatgagtttgaaaccatcctgggcaacatagcaagagctcatctctatttttaaaaattaaaataaataaggaaagaaaaaaaaattaaggtcctctcctgtgtacgttttgaaatcaatgggtagagtacgccaaagttaatttggatcttcaatggccatccttggggccttttgagttccccaaacttgtcttccttaaaacaaaactagaagaccatggtcctaaaattaaacaatgtgaatgggaggcttagtttacttggtacttcaaagtttcataatgcattcgggattcaaacattgcctccctctaagattctatcacaaaattaactgagaccagcaaacagttaaggaaggacaacaaggctttagggccccagattctttcctctccagaggagagatttcctgttctctttcctctgttcttctgtatccacctttggctgaattacctttccctccaattcctcagcttccactacccttgaacctggactgttaaaacttatccccttaatggccgggcaccatagctcacgcctgtaatcccagcactttgggaggctgaggcaggcagatcacgaggtcaggagatcgagaccatcctggctaacacgatgaaaccccgtctttactaaaaatacaaaaaattagccgggcgtggtggcaggtgcctgtggtcccagctactcaggaggctgaggcaggagaatggcgtcaaccaggaggtggaggtggcagtgagccgagatcacgccactgcactccagcctgggtgacagagcgagactccgtctcaaaaaaaaaaaaaaaagaaaagaaaagaaaagaaaaaagaagaagatacttgaacaagcatattgatagcagcacaattggtgattgcaaaaatatggaaccagcccaaatgcccatcaatcaatgaatggataaagaaaatgtaattttatatatatctatatctatatatatctatatctatatatagatatatagatatataatggaatactacacagtcataaaaagaaaggaaataatggcattcaaagcaacctggatggagctggagaccattattctgagtgaattaactccggaatggaaaaccaagcattgtatgttctcacttataaatgggagctaagctatgagaacacaaaggcttaagaatgatacaatggactttgggaactggcgggggaagggtgggagggagctgagggatacaagactacacattgtgtacagtgtacactaatcaggtgctggatgcgccaaaatcttggaaatcaccactaaagaacttatccatgtaaacaaacaccacctgttcccccaaaactattgaaatttaaaaatgttttaaataaataaaatttaaaaggattaaaaatggattatttgctttcaaaaaaaaagaaatcaccacttgcacagtttttatgtaatgtgaaatatgaatatccacaattacatgaaaagctgttaaaaataatcctcccagtccgggcatggtagctcacacatgttgttccagctactgggaaggctgaggtgagagaatcccttgagcccaggagttctaggctgcagtgagctattatggtgccactgcactccagcctgggtgacagagcgagaccctgtctctaaacaacagcaataataatccttccttcctgagtcagacgggcatggagacgcttctggaaggaacaccgcaatggctgcgcagggacagccccaggtccagttcaaacttgtattggttggtgatggtggtactggaaaaacgactttcgtgaaacatcatttgactggtgaatttgagaagaagtatgtagccaccttgggtgttgaggttcatcccctagtgttccataccaacagaggacctgttaagttcaatgtatgggacacagccggcctggagaaattcagtggactgagagatggctattatatccaagcccagagtaccatcatagtgtttgatgtaacatcgagagttacttacaagaatgtgcctaactggcatagagatctggtatgagtgtgtgaaaacacccccactgtgttgagtggcaacaaagtggatattaaggacaggaaagtgaaggcgaaatccattgtcttccaccgaaagaagaatcttcagtactacgacatttctgccaaaagtaactataactttgaaaagcccttcctctggcttgctaggaagctcattggagaccctaacttggaatttgttgccatgcctgctctcgccccaccagaagttgtcatggacccagctttggcagcacagtatgagcacgacttagaggttgctcagacaactgctctcccggacgaggatgatgacctgtgagaatgaagctggagcccagcgtcagaagtctagttttataggcagctgtcctgtgatgtcagttgtgcagcgtgtgtgccacctcattattatctagctaagcggaacatgtgcttcatctgtgggatgctgaaggagatgagtgggcttcgcagtgaatgtggcagttcaaaaaataccttcattgtttggacctgcatatttagctgttttggaacacagttgattccttgagtttcaaatatagactgctacagtcacatcacaatattcagcggtgaaatcttgtttgttactgtcattcccattccttttcgtttagaatcagaataaagttgtatttcaaatatctaaaaacaaaaaatccttcctttttcaactcaatatttgtgtaaggctagattttttaacatatacacttcaatcaaagtaagaaaatggctgggatgcagctggaggccataatcctaagtgaattaatgcaggaacagaaaaccaaatactgcatcttctcacttataattgggagctaaacactgagcacacatagacataaacatgtgtataacagacactgtagacgactagagtggagagggtggggacgtgggttgaaaaactacctgtgggtactatgttcactacctgagtgacaggatccataccccaaacctcagcatcagacaacatacccatgtaacaaaccggcacatgtaacccctgtatctatttttttctggttttttttttttttttttgagacaatttcactcttgttgctcaggctggagcgcaatggcgtgatctcggctcatcgcaacctctgcctcccgggttcaagcgattctcctgcctcagcctcctgagtaggtgggattacaggtatgcgccaccacctccagctaattttgtatttttagtagacatggggtttctccatattgataaggctggtctcgaactcccgactgggattacaggcgtgagccaccgcgcctggccaccccctgtatctaaaataaaagttaaaaatttaaaaataagtacataagagaatgtatgctatgagccaagaatgatgcttgcaaaattttgcaagaacaacacttatgaaaatgaaaaataatcactcttcttgttaccaaaaatcttggtagctgcagaaggtgggatctttcctcactgggagtcgcagagccaatacatgaaaccaaaagtgagccttaagcagagcaagctttatttcctgcacaggacttgtaaagaggagagcagctctgccaagtcaacttctccactagtgaggcggctagtgaggggtgagggggctaaaatgtaggattgctctaatgaaggggttgggcattaaaagtgagggggaggaatattcatatgttttatgggaacaggcagtgaacttctccaaactggtaataccgctttccttttggtccttttaggacttcttctactcatcgtcatggagatcgtcaactgtcatggcatggatgggagcgcaatttagcctggaaacgggattacaatgaagcatgaggtctttttgaagtcatttggccggctctcttggttgtaacgagtctcagctggtttgactacaaaggcaacttcttgaagcagatcctgtttttttgtttttgtttttgttttttgtttcttgttttttccccctagacatctcactctgtcgcccaggctggagtgcagtggtgtgatctcggctcactgcaaccaccacctctcgggttcaagcaattctcctatctcagcctccagagttgctggaattacaggcgcgcaccaccacacccggctaatttttgtattgttagtagagacagggtttcatcatgttggccaggttagtcttgaactcctgacctcgtgatctgcctgcctcggcctaccaaaatgctgcgattacaggcgtgagccaccgttcccggcctatacgttgtttattttggaaaaattaaaaattaagttttttttcattaaagatatgttatttccgatcaagagatcaagaccatcctggccaacatggtgaaaccccgtctctactaaaaacacaaaaattagctgggtgtggtggcacacgcctgtagttccagttactggggaggctgaggcaggagaatcgcttgaacccgggagaaggaggttgcagtgagccgagatcatgccactgcactccagcctggggacagagcaagactctgactcaaaaaaaaaaaaagttgtttctattaacatgtaatgggttattaatattctcttaaatgaattaatatttttaatattttgttttaatatcttttaatttatatatgataaaaattgatacaatccacagaaacaaaatttatttgggtcctcactaatttcttttttcttgttgcccaggctggagggcaatggcacgatcttggctcaccgcaacctcctcctcctgggttcaagtgattctcctgcctcagcctcccaagtagccaggattacagccatgcgccaccacgccggctaattttttggacttttagtagagacagggtttctccatattggtcgggctggtctcgaactcccaacctcaggtgatcagcccgccttggcctcccaaagtgctgagattacaggcgtgagccaccgcgcccagccaggactaatttctaagagtgtgcagagataccgaaacctaaaagtttaagaactgctgattgctgggaaactctgcagtttcccgttcctctcgtaacctggtcatgtgtccttcttcctggatactcatgacgcagactcagttctcattcccaatgggtgtcgggtttctagagaagccaatcagcgtcgccacgactcccgactataaagtccccatccggactcaagaagttctcaggactcagaggctgggatcatggtagatggaaccctccttttactcctctcggaggccctggcccttacccagacctgggcgggtgagtgcggggtcgggatggaaacggcctctaccgggagtagagaggggccggcccggcgggggcgaaggactcggggagccgcgccgggaggagggtcgggccgatctcagcccctcctcgcccccaggctcccactccttgaagtatttccacacttccgtgtcccggcccggccgcggggagccccgcttcatctctgtgggctacgtggacgacacccagttcgtgcgcttcgacaacgacgccgcgagtccgaggatggtgccgcgggcgccgtggatggagcaggaggggtcagagtattgggaccgggagacacggagcgccagggacaccgcacagattttccgagtgaacctgcggacgctgcgcggctactacaatcagagcgaggccggtgagtgaccccggccaggggagcaggtcacgacccctccccatcccccacggacggcgcgggtcccctcgaatcttcgggtcccagattcaccccaaggctgcggaacccgcccagaccctagaccggggagagtctcaggcgcctttacccggttctttttcagtttaggccaaaatgcccacagggtggtggcgacgggggcggggcttggtgggcgggactgactaaggggcggggccagggtctcacaccctgcagtggatgcatggctgcgagctggggcccgacaggcgcttcctccgcgggtatgaacagttcgcctacgacggcaaggattatctcaccctgaatgaggacctgcgctcctggaccgcggtggacacggcggctcagatctccgagcaaaagtcaaatgatgcctctgaggcggagcaccagagagcctacctggaagacacatgcgtggagtggctccacaaatacctggagaaggggaaggagacgctgcttcacctgggtaagagggtccacagggctactctcccatctccttcttgggctaggactgtgcccacagctgacagacctcaaacagtagaagaaacagggatggaggccagaataccactcctcccttggatcaggagagggagctgtcacctgaggtacaggagatcctataccacagagtgactctcttaaagggccagacctctctcaggggcaattaaggaatctagtctcgctggagattccatccttcagatgaactgatgagcagttctctttgactcccagtattaggaatcacgggggagtttctctcgtgcctgattctcagccccacaccaagagtttttggaggtctgactccagcttttctcagtcactcagcatccacacaggccaggaccagaaatcccttttcaccttctaccctgggctagctcatcccgattctagaactttccaaggaataagaggctatcccagatccctaagtccaggctggtgtcaaggttttgtcctcttctcctactataattgtcctcttccttctcaggatggtcacatgggtgctgctggagtgtcccatgagagatacaaagtgcctgaattttctgactcttcccctcagagcccccaaagacacacgtgactcaccaccccatctctgaccatgaggccaccctgaggtgctgggccctgggcttctaccctgcggagatcacactgacctggcagcaggatggggagggccatacccaggacacggagctcgtggagaccaggcctgcaggggatggaaccttccagaagtgggcagctgtggtggtgccttctggagaggagcagagatacacgtgccatgtgcagcatgaggggctacccgagcccgtcaccctgagatggagtaaggagggggatgggaggtcatgtctcttctcagggaaagcgggagcccttctggagcccttccgcagggtcagggctgaggcctgggggtcagggccccttacgttcccctcttttcccagagccggcttcccagcccaccatccccatcgtgggcatcattgctggcctggttctccttggatctgtggtctctggagctgtggttgctgctgtgatatggaggaagaagagctcaggtggggaagggagaagggtggggtctgagttttcttgtcccactgggtgtttcaagccctaggtaaaagtgtgtcctgcctcgttactgggaagcaccatccacacacacgagcctacccagcctggggccctgtgtgccagcacctactctttttttttgagacggagtcttggctctgtcacccaggctggagtgcaatggcgtggtttcagctcactgcaacctccgcctcccaggttcaagcaattctcctgcctcagcctccctagtagctgggactacacatgcgtgccaccacacctggctaatttttttttttgtatttttagtggagatggggtttcactatgttggccaggctggtctcgaactcctgactttgtgatctgcctgcctcggcctcccaaagtgctgggattacagtcgtgagccaccgcacccagccgcacctactcttttgtaaagcacctgtgacaatgaaggacagatttatcaccttgacgattgtggtgatggggacctgatcccagcagtcacaggtcacaggggaaggtccctgctgaagacagacctcagaagggcagttgatccaggacccacacctgctttcttcacgtttcctgatcctgccctgggtctgcagtcacagttcaggaaacttctctgggatccaaaactaggaggttcctctaggaccttatggccctgcctcctccctggcccctcacaggacattttcttccaacaggtggaaaaggagggagctactctaaggctgagtgtaagtgcggggcgggagcgtggaggagctcgcccaccctataattcctcctgcaccacatctcctgtgggctctgaccaggtcttgtttttgttctaccccagggagcgacagtgcccaggggtctgagtctcacagcttgtaaaggtgagattctgggggtctgaagtgggtggagggtggggcagaggggacaggactgggttgtggggattttttgattcagaatttttgagtgtgtggtgggctgttcagagtgtcatcacttaccgtgactgacctgaatttgttcatgactattttcttctgtagcctgagacagctgccttgtgtgcgactgagatgcacagctgccttgtgtgcgactgagatgcaggatttcctcacgcctcccctatgtgtcttaggggactctggcttctctttttgcaagggcctctgaatctgtctgtgtccctgttagcacaatgtgaggaggtagagaaacagtccacctctgtgtctaccatgacccccttcctcacactgacctgtgttccttccctgttctcttttctattaaaaataagaacctgggcagagtgcggcagctcatgcctgtaatcccagcacttagggaggccgaggagggcagatcacgaggtcaggagatcgaaaccatcctggctaacacggtgaaaccccgtctctactaaaaaatacaaaaaattagctgggcgcagaggcacgggcctgtagtcccagctactcaggaggcggaggcaggagaatggcgtcaacccgggaggcggaggttgcagtgagccaggattgtgcgactgcactccagcctgggtgacagggtgaaacgccatctcaaaaaataaaaattaaaaaataaaaaaagaacctggatctcaatttaatttttcatattcttgcaatgaaatggacttgaggaagctaagatcatagctagaaatacagataattccacagcacatctctagcaaatttagcctattcctattctctagcctattccttaccacctgtaatcttgaccatataccttggagttgaatattgttttcatactgctgtggtttgaatgttccctccaacactcatgttgagacttaatccctaatgtggcaatactgaaaggtggggcctttgagatgtgattggatcgtaaggctgtgccttcattcatgggttaatggattaatgggttatcacaggaatgggactggtggctttataagaagaggaaaagagaactgagctagcatgcccagcccacagagagcctccactagagtgatgctaagtggaaatgtgaggtgcagctgccacagagggcccccaccagggaaatgtctagtgtctagtggatccaggccacaggagagagtgccttgtggagcgctgggagcaggacctgaccaccaccaggaccccagaactgtggagtcagtggcagcatgcagcgcccccttgggaaagctttaggcaccagcctgcaacccattcgagcagccacgtaggctgcacccagcaaagccacaggcacggggctacctgaggccttgggggcccaatccctgctccagtgtgtccgtgaggcagcacacgaagtcaaaagagattattctcttcccacagataccttttctctcccatgaccctttaacagcatctgcttcattcccctcaccttcccaggctgatctgaggtaaactttgaagtaaaataaaagctgtgtttgagcatcatttgtatttcatttgtgcgttttgtgccttgttgttttaattttttaaccacattcaagctatcctttggcttccaatgccatggtccacccagaactgcattcactggcccgtgttctagttctggtcatgccgactttcccgttttcctggtgaatccctgtaatcacctgagtctcattctgtcaggtgatatccagtaagaaggcaacatgtgcggtgagaaagcccagggagtcctgggtgtgaatttttactttgccatttcttcctgtgtgacacgcggtggggcttcacctgtctgagctccagttcctcatcttgtacgtggcactgttttcttgggagagtcattataaagctaatataaagtacctgtactgtggtttgaatgtgtcctccaaaaagcgtgtgttggaaactgaatccacaatgcaaccatatcgggaagtgaatcctaatggctggctggccatggaggttccaactttatgaatggattaatactgattataaaagggcttgaggttgaggcaagttcaacctcttgccctcactcacccacttgcctttaccaagagatgatacagcaaaaagactcaccaaatgccgggatcttgatattagacttcttatcctccagaaccatgaaataggctgctttgctttataaattactcagtctgcgtattatattacagcaacacaagatgggcaacctgatacttaggtttcagttagtggtagatatttttatttcaagcattcctactggagtattagtttcttcataagcccagaatctttgcattttagcaacaacaaataagtctttttttttttttttttttttgagactgagtttcactcttgtcacccaggctagagtgcaatggcatgaccttggctcactgcaaacttggcctcccaggtttaagtgattctcctgcttcagcctcccaagtagctgggattacaggcgcctgctaccacgcccagctaatttttgtatttttagtagagacagagtttcatcatgttggccagctggtctcgaactcctgatctcaggtgatccacccaccttggcctcccaaagtgctgggattataggcatgagccaccacgttccaccagaagtcttaattaatgcaaagaaaatcaatctatagatttgatggaaatttggactcctatatcctactttttatcccactcctatatactactccttattagtgtcccagaaagatgaactattttccttctctacttggtctgcccatttctacttcctgccatatcggcaggctatgtttgcctcacctcaaagatctgccttcctcagttttagatcttaaatctttttaagccagactccaagggatctttaacaaatatttatcgaacccttcctgtgttcaaagaatgttgtgaggtccagggtgggactagggggcgagaaaggttcctgcgctgaaggaatctaagatttagtaacaatgaataaacagacttgaagataactattgtggttagcgctgaaagaaacgtacaaaatgccaaaagtcaaggaggaaactatgttttctaggacagtggttcccaacatttttggcatcagggaccggtttcatggaagacaatttttcggaggggtggttttgggatgattcaagcgcgttacctgtattgtggactttatttctattattacattataatacataatgaaataattatacaactcaccataatgtagagtcagtaggagccctgagcttgttttcctgcaactagacagtcccatctgagggtgatgggagacactgacaggtcatcaggcattagattctcataggagcgagcaacctagatccctcgcatgcacagttcacaataagattcacactcctatgagaatctaaccccactgctgatctgacaggaggcagagctcaggcgctaatgcttggtcacctgccactcacctcctgctgtgcagcccagttcctaacaggccatggaccggtaccagtccatggcccagggcttgggaacccctgttttaggagacttaggtttttctaaaggaaaaaatgtttgagttatgctttgaaaaatgtaagacaccactgtagatgttttaatcagggaattgggttattaccaaaaaaaaatgttggaagatgaaagagcaggttctttatgcctcctggcttgaccctggaacaatttagaaccagcccagtgaggcatgtactccccatgaggccacacaagagctgtgctttcttagatctggatcccactaccacataggggttcctgggcacctggacaccagggaagaggggtcaaccaggtcccactcctctggcatgacactcagtgattcagtcaagatactgttgggaaaacagcccatgccatgggacttccccatggtcggaaaagtcttgaatagctaaaagcaaaacaggatagttaggctgcattatgtagataatggtgactcatgggcaggccctgcctccttgggccattgtatgtgaacagatctttgtgtgattatgggataattctgggttcttttctccatgtgcctgttcttaattggcccaggagagggaacccaagggaaggaggaacccgagtgatcttgtcctcttttgacatctcatttctagccacaaggttatgaatcatagatctccagaagtcagtggtcctagaggaaaaaagcatctgccatagcagcagaatgacagggagacagctattcctattactagagttttaacagcccctctcagccagctagcccagactaggatcttaacgggggctgggacttacttccatatattgtaaatgatgtaaccttgtcttcatgatgaccttaaatatatcttgatgaacagtataagaaagcaaatgaagcctgggcgcggtggctcacgcctgtaatcccagcactttgggaggctgaggcgggttgatcacctgaggttgggagttcaagaccagcctgaccaacacggagaaaccctgtctctactaaaaataaaaaattagctgggcgtggtggcgcatgcctgtaatcctagctactcaggaggctgaggcaggagaatcgcttgaacccaggaggctgaggttgtgcagtgagccaagatcacaccattgcactccagcctgagcaagaagagcgaaactgcgcttcgaaaagaaagaaagagagagagggagggagggaggaaggaaggaaggagagagaaagaaagaaagagagagagaaagaaagaaaggaaagaaggaaagaaggaaagaaaggaagaaaggaagaaagaaagaaaggcaaatgatcacttagaggattttgtttggtagttaaaaccattttgaaacagagggagggaagaaatcacctatgcttcctcagtggtaaagagactgggaaccaccacgccagagttagaaaatatgaggcaacagaagggctgttatatgtagtgaaaatttccaaacccggtcccctggagggaatacctggtgactgggccttagaggaaagagatgcttgtccagcccattgcctgtgtgtccaggagagactgtgcccaccttgagagactgagagaagaccctagtgaggagaagcccccaggccagccgtcagcacagggcattggaggtccccaaccagctccaagtcctgaacagagcacagcctccagaggtttgtactgttcatacccagcagaggctgtgtgccagccctccccatgcaaatcagcgtccctgcagggtatgtaaaggacctctacctatgctttctatgggggaacaaatatcccatgggacactgaaagactatggaacattgtagaacatgtatttaccaaactgtgtccaactcagagcctaaattgtttattggtgctgtttcaaccagtacacgtgattctttttttttttttttttttagtatttattgatcattcttgagtgtttctcggagagggggatttagcagggtcataggacaatagtggagggaaggtcagcagataaacatgtgaacaaaggtctctggttttcctaggcagaggaccctgcggccttctgcagtgtttgtgtccctgggtacttgagattagggagcggtgatgactcttaatgaggatgctgccttcaagcatctgtttaacaaagcacatcttgcaccgcccttaatccatttaaccctgagtggacacagcacatgtttcagagagcacggggttgggggtaaggctatagatcaacagcatcccaaggcagaagaacctctcccagtacagaacaaaatggagtctcccatgtccacctctttccacacagacacagtaacaatctgatctctctttcttttccccacatttcccccttttctattcgacaaaaccgccatcgtcatcatggcccgttctcaatgagctgttgggtacacctcccagacggggtggcggccgggcagaggggctcctcacttcccagactggccgggcagaggcgccccccacctcccgaacggggcggctggcagggcgggggctgccccccacctcctggacggggcggctgccgggcagagacgctcctcacttcccagacggggcggctgccgggcggaggggctcctcacttctcagacagggcggcccggcagagacgcccctcacctcccagacggggtggcggtcgggcacagacactcctcagttcccagacggggtcgccgccggacagaggcgctccgcacatcccagacggggcggcggggcagaggcgctccccacatctcagacgatgggcggccgggcagagacgctcctcacttcctagatggggtggtggccgggcagaggctgcaatctcggcactttgggaggccaaggcaggcggctaggaggtggaggctgtagcgagccgagatcacgccactgcactccagcctgggcaagattgagcactgagtgagcgagactccgtctgcaatcccggcacctcgggaggccgaggtgggcagatcactcgcggtcaggagctggagaccagccctgccaacacggggaaaccccatctccaccaaaaaatacaaaaacaaaaaaaaacaaaaaaaaaaaccaagtgattctttctgcagaggacatcttggctcttggcactccaccacagacttggtatgagatcctggttgagcactttttttttttttttttttttttttgagacagagtttcgctcttgtttcccaggctggagtgcagtggcatgatcttggctcactgcaacctccgcctcctggattcaagcgattctcctgcctcagcctacggagtagctgggattacaggcatgtgccatcacgccctggctgattttgtacctttagtaaagacggggtttctccatgttggtcaggctggtctcgaactcccgacctcaggtgatccacacaccttggcctcccaaagtgctgggattacaggcgtgagccaacgcacccagcctggctgagcactttcaagtctcattcctaacatctgtcagttaagctgggataacaattatctgactgactgcacggaattctgaatgaattgaattggataatacatgtaaatccttgtggtgggaatttgggtgccattttctttgcattatgaaaatccaggtcaactcttctttcttctcccaattgtttttattgcacatctataaaaacaagaaaagaattttcttgcttttcttttttttgagacacagtctcgcactgtcgcccaggctggagtgcaatggcacaacctctgctcactgcaaactctgcctcctgggttcatgccattctcctgcctcagcctcctgagtagctgggattacaggtgcatgccaccacgcccagaaaattttttgtatttttagtagagacaaggtttcaccgtgttagccaggatggtctcaatctcctgtcctcatgatctgcccacctccggctcccaaagtgctgggattacagtcatgagccaccgcgcctggccaagaattttctaataaacaagaaaaacctcacctgtaatcccactacttggtacaataatcatacttatttttctttatttccttccagtgtgagcaaggacaatttagctttgggaacccacaaagaaaccatttcaattaaaagcacaggaagccccaccagtcccatgaggtttttgccacccctaagtagttccatatgagaaattaagagtagcgatgcttgctttgaggaattggagggaaaactaaaatgaaagttgaatttggataagagaaaaatcaagggcactcactcttcccaaccccagcctgtctgactctctccccatcatcctcctcactactttcaggcagggtggagatagcaccagggggagattctgggagacagggcactactgcaagaacagcaggacagccccactggtggctgtgggatgctccgtggccctgcctactgctgttctggaggatgcaccgcctcgctttcctttctggtgttagagccaggtgactctgtccaaagagtaggttctttttccccacagaggcaaacaggaaacgtttcctttcctaactagctctgcctagtgcctggaatcttactgagtcagtcccgcagtaagtcagcagctcaggaaatctaccctctctgagcctccctgcagttcaagctgcttagggaacttgatattttcaagacatctgtctacacatgggcagcccagccgccgagttagtggtggcaaccaaagcgaacagaggacttggcttcctgaaaacagaggcaaagaagtatagctatccaaccttctgagtcttgtctctatatggagatgcccatatggacaaatagggtctggacaaggggaagggttaacatgagaaagtcacatgatttctgctatgctattcctctgtgcgcttaccctttctgtttctaaatatttcagctaaaagacaataaatactgcaacccttacattccttcagccctgctttcacttgtcctgggtgtcctgactgtcatcttcattcatttatatcaaacaccattcaatcaatacttactacaagcaaactatatgtgagatcaagagtactattcaaaatagttgacagctggtatggtaatggaaattaatatataaataaaattttcccaattatgctatttttctgtcctaactaaatgattataaaactacttaccaagtgacacagttgaaatataaataatttcttaaatagttataacaatttccaaattatttattgatttttaaacattttttgcatttcttaggtggtaattattggttaagtgatatatgcctatgttagccatgatttgacaaaagagccttgtataagcttctgataatttccccattaaattgtttgtatattatgacgtatgtaatcaactatattgttcatggtgccaaatcctctctcactttagcagctatgttaaagattttttagcccttgaactgctgtctgaaattctttttctttcttttttttttttctttttttgagacagtctcactctgtcgcccaggctggagtgcagtggtgcgatcttggctcactgcaacctccacctccccggttcaagcaattctcctgcctcagcctcccgagtagctgggattgcaggcacatgccaccacgcccagctactttttgtatttttagtaaagagggggtttcaccacgtaggccaagctggtctcaaactcctgacctcaaatgatccacctgcctcggcctcccaaagtgctgggattacaggcatgagccaccacgcctggcctagaaattctttttttttttttgagacggagtctcctgtcgcccaggctggagtgcggtggcgcgatctcagctcactgcaagctcctcctcccgggttcacgccattctcctgcctcagcctcctgagtagctgggactacaggcgcctgccaccatgcctggctcattttttgtatttttagtagagacggggtttcaccatgttagccaggatggtctcgatctcctaaccttgtgatctgcccgcctcggcctcccaaagtgctgggattacaggcatgagccaccgcgcccggcctagaaattcttattatttaatatctccgttcactccaccacaaaaatcaattaataaaagccatctttaataagtaggcttaattgtattgattaaattaaaaattgtcttgatttaataggttacatctatgaagctttgtaaacatccttcatggttgacttaatttaaaaattttaagttcttaatatattttacttttgtcatcaaactacaattgcaatcacataaattattagataatctaattgactttttctcttgaagttgacatttttctttcaaatggtatatcatatttttaaacaatactatctactttttcccctttgctttatgtatttaattttatatattaactgattcttatttttctacaattaatccagcttctgtaatttttaatatttcctctggaaaggataaagataacattgacatctctgttaatatataagttattaacgtcaaatttctgggaaaaaaagtttatgtcctaaacacttactactcccatttcacaacttctattaaagtgaatataaaaggtttggtacaattccctaatgctcttggcatcccactattacagagtgcccaaatatgctttctagtttcatgacttcaattccagtatctttagaaatatttttaattttcccaaatgcttatttcatatgtagttgtgaatataaagtttagtgaggcaaatatttgaagtaatttttcatttaaacattttactgcatcatcctgacatcactgaatacagtaacttatatagtaccaatttaaaatataaagagacttttttttttttttttttgagacagattgtcgctctgtcaccaggctggagtgcagtggcataatctctgctcactgcaaactctgcctcccaggttcaagcgattctcctgcctcagcctcccaagcagctaggactataggtacatgccaccacacccagctaatttttgtattttttgtagagacagggtttcaccatgttggccaggatggtctcaatctcttgacctcgtgatctgcctgccttggcctcccaaagtgctgggattacaggcatgagccattgtgcctggccatatagagacttctctaaaactttggcttctctgaactttctctgtgacatatactagaaccatctgtagcattgtgtaaccatttcacatcaaaaccacttttcttgagcactgatgagtaagtaagcttgatacatcatttcagttcctcagatgagcaaaaatcattagttttatatcatcagttttataagtctgaaatttagtatttaagtcactaataaaaacacgtttttgtggccgggcgtggtggctcacacctgtaatcccagcactttgagaggccaaggtgtgcggatcacgaggtcaggagatcaagaccatcctggctaacacagtgaaaccccgtctctactaaaaatacaaaaaattagccgggcatggtggcaggcgcctgtagtcccagctgctcgggaggctgaggcaggagaatggtgtgaacctgggaggtggagcttgcagtgaaccgagatcgcgccactgcactccagcctaggtgacagagtgagactccgtctcaaaaaaaaaaaatttttttttgttacataattgaagctttcttggtgatgattgattgcctagatttataaatttactaaaaagttgtctcatcatggtagatatacgttttgtgaccattgtaaccattaatgtagactgcaatgatatgcactatttacaaccttttttaagactctatttagcagtagactaattacacagtaggtaatattagcattctaatggtactttttcaatgttttgttctttttatgatacaaagtatttcaggggatttattatttcaaagacttcattatgtgaagctcattcataatattcttcaaattcttcttattactagtttttccctgaattctgagcaccgacaatatgctagaacattcaccttttcacacatccacaagatgtgtgctttgcatatcgttttcatttaatatttacatttcaagcaataatcagctacctgtgagttttgtcaaaattatcaggggttttttgtttgtttgttttttgacatggagttttgctcttgttgcccaggctggagtgcaatggcgccatctcagctcactgcaacctccacctcctgggttcaaatgattatcctgcctcagcctccccagtagctaggattacaggcatgcaccaccacacctggctaattttatatttttagtagagacagggtttctccatgttggtcaggctggtctcgaactcccaacctcaggtgattcactcaccttgagctcccaaagtgctgggattacaggcatgagccaatacacctggccaattatcaggtttttaattaaattttagaaatgtgaattattgtttcctttgaactgaatcttatgcaatactgaaagcattcccacctgccataatctttgcatatcagttgttccaggctgtgattcaatattaataccattggtttcatgatttgtctcagattcagaagagtcatgtttacagtatctaaaagcaatgtttaaaatgtatgtaggcctggcactgtggcttatgcctgtaatcccagcactttgggaggctgaagctgatggatcacctgaggtcaggagtttgaaaccagcttggccaacatgacgaaaccccatctctactaaaaatacaaaaatcggctgggcgcggtggctcatgcctgtaatcccagcactttgggaggccaaggcaggtggctcacctgaagtcaggagttcaagaccagcctgaccaacatcgtgaaactccgtctccactaaaatacaaaaaattagccaggcatggtggtacatgcctgtagtcccagctacttgggaggctgaggcaggagaattgcttgaacccgggaggcagaggttgcagtgagctgagatttcgccattgcactccagcctgggcaacaaaagtgaaactctgtctcaaaaaaaaaaaaaaaaaaacccttctgtctcaaaaaaaaaaaaaacaaaaacccttctgtctcaaaaaaaataaaataaaacaaaaatataaaaatttggtgggtgtggtggcacacacctgtagtcccagctactcaggagactgaggcaggaagatcgcttgaacctgggagacagaagttgcagtgagccgagatcacaccactgcactccagcctgggcaacagagtaagactcttatctcagaaaataagtaaatagataaataaataaaatgtatttaaactttgtcacttcactcttactgtttactattctaagttcttgaatttatagatatcaaaacactgcacagttattatttccagatgaataataacacaataacaatagaaacaaggaaaagccaaacaaatatactatttataagttacagcatgtgaggataacaattaactgatgattttcctaaaccacaaaacaatgaatgtacaatggtgacatggctgaaccagccggtggtgccataaatgattctcagatgctgcagtgcaggagacccatccattgatgatcactgtgatagactaagacaaatagttaattagttaatgagatattagaatttctagtacttattaattttaccacctatcacgataaccattctattttctgtaacaatcagtattggctgtactagtgcacactggctggatgccagtgtgtaagacaatgccataaagggctatatgagcattagctactatgctatgacttttaacattgagttgattaggttcaagggtcaggtggggcacttttagaaattacagtaacagaggccctcaggaggtaggattcccttttctttttggagacagagtcttacgctgtcacccaggctggagtgcaatggcgggatatcggctcactgcaacctccgcctcccaagttcaagcaatcctcccacctcagcctcttgagtagcagggattacaggcatctgccaccacgcctggctaatttttgtatttttatttttatttttgttttgagatggagtttcattcttgttgcccaggctggagtgcaatagcgcaatcttggttcaccgcaacctccacctccgaggttcaagcaattcctgcctcagcctcctaggtagctgggattacagggatgtgccaccacacctcgctaattttgtatttttagtagagacgggttttctttttttctttttttttttttttgggatggagtctggctctgtcgcccaggctggagtgcagtggcacaatctcgtgaggatggctcactgcaaactccatcacccgggttcaagggattcttctgcctcagcctcccaagtagctgagattacaggcgtctgccactgtgcctggctaatttttatatttttgatagagacggggtttcaccatgttggccaggctggtctcaaactcctgacctcaggtgatcagcccaccttggcctcccaaagggctgggattacaggcgtgagccaccgtgcccggccaaggcagggtttctccatgttggtcagtccggtcttgaactcccgacctcaggtgatccacccacctcggcctcccaaagtgctgggattacaggtgtgagccactgcgcccggcctaatttttgtatttttagtagagtagagctgtgatcatgccactgtactctagcctgggtgacagagtgagatgagaccctgtctcttaaaaaaaaaaaaatggccaggcgccatggcttatgcctgtaatcccaacactttgggaggctgaggcaggtggatcacttgaggtcaggagtttgagaccagcctggccaacatagtgaaaccctgtctctactaaaaatacaaaacttgccgggcgtggtagagggcgtcagtaattccaactacttgggaggatgaggcaggagaatcgcttgaagccaggaggcggaggttgtagtgagccaagatccccccattgcactccagcctgggcaacagagcaagactccgtctcaaaaaaaaagaaagaaagaaaagaaaagaaaaggaaatatgcagtctatttaggaaagaatgcatgagtttgttcataaagcataacagtgggcgtgggtaaccaatgaagactgctcgggatatccattaagcacaaattcctgcgaaaatacataagaccacaggcaccagattccacaacaaagtgtgtgtgtgtgtcgacatgcatgtgtgtgtgtgtgcacgcacatgcatgtgtgtggggggtgtgcctgtgtgtttgtgtgcacatgggtgtgtatgtgtgctggtgtggagaaaacctgattaataatgtccaagccacactccaagacctcttccactcaggctggggtcccaggagcagatggtgggcaaagggcaggaataacctgtgcctcaagctgcaaacaggatccacaaaatagccaaaagacagtgttcggggtgtaactaaacttatgaggcaaagaggagagactgggagaggactgagaggaaaaccaggtgtgaggctgtcatgcaaagcaggtcccttggggtcaccacctgttgttcaccagggctcaggataaaagccagaatatcgcatgctatgggttaagaaataggcttttgagggaattttcaattcagtgtcagcaagtaaagagaaagcatgagtccaattccttttatttttccatagaagagcaaaccaggcacactactggacatgcaggtggaggggagggatgcggcagtgtgttattgctctccattatgagtcaagcatgagagcagccttatcaatgaagaggcacacaaacagcgtaggcacctagcactcttgattagagtgtcagttattgacaggttgtgctaacctgacttctaagatggtctctaatgatcccccatcttagtattcgagtctttgtggaatccttcccaccttgagtttggtatggaccttgtcacttaattctaaccaatggaatatgacaaaggtgaaagtctatcatatccatgagtagacaataagagtttgtggcttttatcttgctagcagactcatttactgactcaagtaatcaagctgccatgttaaggaggtccatgtggtgaggaactgagagtgctctcaactcaacattcaagaggaaccaaaccttcagtcctaccacccttcgtgcttcctaccaacaactaagttagtgagcttggaagctcatcctttcctagttgagtcttcagggaagaccccaactatgattgcagccttgaggggccctgaagagaggacccagctatgctgtattgaattgctgtccttcaaatattgtgagataataagggtgtgttgttttaagccacttattttaggacaatttttatgctgtaatgataactaatatacaggagatgttcaaaaatacaagctacccaggaactggagacctaggggcccatggctagtcacacgtccctctgccaggagtgagaaaaacacccctggttccactggattctaacttttggaaaccccactcactggaagaagagggagccccaggttctaatgagtttgtttttcaggcaacccagaatgacctcccagcatcatttccagacagtgtggctcctgacatcacaaatatagtagaataacaccaaactgagtaaataggacagtaggctgcagaccccctcatgtgccaatgatctttataaagacttaaaacctcactatgcatagagttgataaaggcaccaaatgaaccagagaaaggagactcaagtcaagaaaatgtatctcaactaggaaatgtttttgtgaccacaaaggggaggaaccaggaagttgtggtaaactgtagcggaagttaaagctaaaaaaaaaaatgagagagaaccagtgaatttaaaaatacttaacagacataatgacaaaaagtaataagtacatctctttggatcatgagaaagaagatcaggaacgaaagatctagctgggccttcccccaccctccccagccttggttccctgattagtgctccaggcctctccagggcctgacactcaatcttctcttgggaactaattatggcaatgtaccacgaggtactgttcctcagactaaacgtggttttttgtttgtttgtttgttttttagacaggctctcactctgtcacccaggctggagtgcagtggcacaatctcagctcactgcaacctctgcctccccagttaaagcaattctcccacccacttcagcctccccagtagctgggactacaggtgcacgccaccatgccctgctttatttttattattattattattattattatttgtatttttggtagagacgaggtttcaccatgttggccaggctggtctcaaactcctgggctcaagtggtctgcccacctcagattcccaaagtgctgggattacaggcatgagccactgtgcccagcgtaaacgtggtttcttatgtttttaaattccccttgaaaatattctcttgtgaccaaaaaagacccttgggtgtacagagaataggttttgtcataactgtaactaatgtgagcttccactaaaaacccaagatacaaatatattcacaactttatttttccagtgatccattctaatacctcttgaggcttcctgtgaaatgtctaagcaccccacagccaaagggtacactcgtagtccccttcagtgctaagaacagaaaagaagctgttgcttttctctgctataggtgttgctgttgaaaattcatcccacacaattgatggagataattttcactgctttagtcacctaaacaggccttgctgatccacattcctgttcagattactaggattctctaagggagggatgattgttgaagctgagtgatggaaacactttgctattctttctaattttttataaattttaagttttcaataataaaaagttaaaaaccaaaaattaaaagaatctgacaggccagatatggtggttcacgcctgtaatactagcactttgggaggctgaggcaggaggatcgcttgaggccaggatttcgaggctagcctgggcaacatagtgagacactatctctacacaaaaaaaatttaaattgaaaacaaaacggcattccggctccttggagaaacggtcgattctaggactggggcatcctatgatgtcagaaagtatttacatgctcgattaaaaggtgagaaccatatcaaagggacacaggagccaactggaaataattccaatagttaaaatggaaacaatttgagcaacaaaataagtaataatggaattggattataacccatagaataaaataagtatccattagcccatattgataaaagaaattcttaaataaataaatgggaagatgtggcagtactttttcacagaagaattcattagcaaagcctaacggtgtggctagcctgcgtcatgacaatggttgggagaagcagcaaaatagcagactagccagaaatttaaaagggaaatcaaaggaacaaaacagacaaagaatgccttagtaaaataccatttaactttggtagtttaaaaagctatgtgcagcacacagggttataactgcttagaagagagacttgagaaggctataggaagctactcctccctgcaactaaatatgaggtctcagaaataaagagaaagccatggctcacttgtaaactctctgaactttgaaagtaccctccaaatcacacacagctccaacagcagggttagaagccttactggcttaaggcatttaagcacaaactctaacagatcactggctgaccattaagctatgctgatccaggggcaacccctaagaattcaggcttaaaaataaacataagaattaaaaaaggacgggaggctgaggcaggagaatcgcttgaacccaggaggcagaggttgcagtgagccgagatcacgccgttgcactctagcctgggcaacaagagtgaagctctgtctcaaaaacaaaaaggaacctgagcagaaatatctgagcagaaatatctgaagcctcatactgcatactgcaagggaaaaggactccactgaattagtacaggcaagtcactataaaaatatctgaaccctcatactgcaagggaaagggactccacagaattagtacaggcaagtcactataaaaacaaacaaaacaacaaccaccttcacccccaagagaaagaaattggaatccagagctagcatatattgtctaaaattttcagttttccaaaaaagttacaaaagggcaaagaaataggaaaatgcaatccatttgcagggagaaacagtcaatagaaattgtcggccaggcacggtggctcatgcctgtaatccctgcactttgggaggctgaggtgtgtggatcatttgaggtcaggagttcgagaccagcctggccaacatggtgaaatctgtctcaataaaaatacaaaaattagctgggcatggtgatgcacacctgtaatcccagctactcgggaggctgaggcaggagaattgcttgaaccacggagtcagaggttgcaatgagctaatatcatgccactatactccagccctggaaatggagtgagactctgtctcaaaaaaaaaaaaaaaattgattcacacctaaacattaatatattatactgaaactattaccagccaaaaatagaaatgacatcttaaaagcaatgagaaaaaactcatctcatacaaatacactcatacacacagacacaataatcttaatagctaacctcatcagtaacaatggaggttagaaggctgtaacatgggctgggtgccgtggctcatgtctataatcccagcactttgggaggctgaggcaggcagatcacgaggtcaagagttcaagaccagcctggccaacatggtgaaaccccatctctactaagaatataaaaattagctgggtgtggtggtacatgcctgtaatcccagctactcgggaggctgaggcaggagaattgcttgaacccgggaggcggaggctgcagtgagccaagattgtgccactgcactccagcctgggcaacagagcaagactctgtctcaaaaaaaaaaaaaattaaagaagacagtaacatatgcaaatttgggggttagtggggagaagctagcaatcaagaattttacatcaagaaaaattatccttcaaaactgaagaccggtacagggacagtggtttgcacccataatcccagcactttgggaggccaaggtgggaggatcgcttgaacccaggagttcaagaccagcctgggcaacaaagtaagaccctgtctctgcaaaaaaaaaaaaaaaaaaaatttagccatgtgtggtagtgcacacctgtagtcctagctactcaggaggctgaggcaggaggctctcttaggcccgagagattgaggttgcaatgagacatgatcatgccactacactccggcctgggcaacagagcgagaccctgtctccaaaaccaaaatttattctaaagaaaacaaaaagagaagccaacatgaacatattcttagataaacaaagactagggagatttatctcttgcagatatgtcttacaagaaacactaatgtaatactaaagtaagttcttcagactgagaagaaatgacaccagataataatcccaatccaatgaaaaacaattattgtatgtcaattaaagataaaacttgtagctaggcacagtggcgcacacctgtaatcccagctacttgggaggctgaggcacaagaatcacttgaacccagcaggtggagtctgcagtgagccaagatcacaccactgtagtccagcctgggcaacagagcaagactccatctcaaaaatattacattaaaaaaagtaaaatttgtaaaagaaacaaacagcatcagaaaaaataatatgttggtaattattttttaaaaactaaaaactaaaaactacaaatctcttttttttctttttcttttttgagagacaaggtctcactctctcacccaggatggagtgcagtggtttgaccatcgctcactgcagcctcaaatcctggactcaagtgatcccctcacctcagcctcctcctgagtagctgggactacagatgcacaccgccatgcctggctccttttcatttcttaactgttttaaaagaaattacataaaacaacaattataaaattacagtgttgggtttgtaacatctaaagataatgtgtgtgtatatatgcactcacacacatatgacaataatggtacaaaggatagggaaaagatggagttacattgaaacaaaggaaccacatcagattgtaagtccaatccacaagaacaaatcatcagaaacactaaataagtttcatacgaaaaactttaagtgtattttactaatttcttctcttaattttttaaaagacgtagaatttggctgggcacagtggctgacgcctgtattcccagcactttgggaggccgaggtgggtggatcacctgagttcaggagttccagaccagcctgggaaacagggcaaaaccccgtctctactaaaaatacaaaaattagctgggcatggttgtgctcacctgaaatcccagttactcaggaggctgagttgggaggatctcttgagcctagaaagcagacgttgcagtgagccgagatcatgccacttcactccagcctggagtacatccctacaccccctcaggttcagtctgaactgaacaggggatacctgtgaaaggaaaataaatcttggggcccgaaaatcactaagctaaagggaaaagtcaagttgggaactgctgagagcaaacctacgtctcattctattcggtcactcctctgcttactgagataaatgctatctgattgcctcctttggagaggctaatcagaaactcaaaagaggccgggcacagtggctcacacctgtaatcctagcactttgggaggccgaggcgggtggatcacccgaggccaggagttcgagaccagcctggccaacatggtgaaaccccgtctctactaaaaatacaaaaattagctcagcgtggtggcacatgcctgtaatcccagctattcgggaggctgaggaatgagaatcgcttgaacctgggaggtggaggttgcaacaagccaagatcgcaccactgcactccagcctgtgcaacaggagcgagcctccatctcaaaaaaaaagaaactcaaaagaaagtaaccatttgtctcttatctacctatgacctggaagccccctcgccacttggagttgtcccaccattgcttcaagttgtcccgcctttccagaccgaaccaatgttaatcttacatatgttgattgatgtctcatgtctccctaaaatgtataaaaccaagctgtgccctgacaacttgggcacatgtcatcaggacttcctaaggctgtgtcaccgacacacatcctcaaccctgacaacataaactttctaaattaactgagacctgtctcagatattcagggttcacactcccctggaccccctgactttcttcagggcactggccactttcttgtctgtctttggacactctcctctagaagtctttgaaattcttgaggcaggaaggaccaattcccagccctgaatcttgcataaagtgggtcttttttaaatggaaatacggctactcctcaaaggaaggctaggaattttgctctgtgtgaccctagtcgtagttcttcacagagggctccatttcacttgcctttccttctgcttttttcttcactcgtttccccacagagcaagacaaaagaagccggcaaggatggctctggtcagggtctgccttcagccacccaaatgggattgcaaagaggaggacagggatggaaaggggaaagtttgatttggtttggtttgcttagtctttctattggtaccacttccttatcccaacctcatcatcttccccgatccctaccaacccactgcaggcatatgagccctaaaatctgggaaaggcttttttccctaggggccctggcctcacagacttgcccaggggggtaaattctcagtggctcagtggcacgtgcctcacgtcctcaccggcagcctagatagatagatagatagatagatagatagatagatagatgatagatagatatatagtttttttttttttttttttttttttgagacggagtttcgctcttgccgctgcccaggctatagtgcaatggcgccatctcggctcaccgcaacttccgcctcccaggttcaagcgattctcctgcctcagcctcccgagtagcttgtattacaggcatgcgccaccacacccagctaattttgtatttttagtagagagggggtttctccatgttgttcaggctggtctcgaactcccaacctcaggtgatccgcctgtcttggcctctcaagtgctgggattacaggggtgagccaccgcgcccagccgggagcccctattttaaggacgctattgctgtggaggagtaaccccacttttaggaatccttttccgtgcgaaaggctgtttgagatcaggcgcaacaacttctcccgctcaggttaccctcagaaaggctatggaccccggactccgccccagattgcataacaactgaggggtgggtccctatttcctctctgggatctgtagccaatcattcacgaggtaaacagaacgaccgagtttctctcagccgagaactgtggctgcccctccggtgaaaacagaggaagtgggagcggcaggaagcgctttgggaccagggcgacccctgaagcgtagaggaaccaggtcacaagcatacgtgaatgctcacattccatagttatcaaatgtattcaggtttaaattttacttttctagaaaaaatgtaaataatccgttgagaatatttaatgaaaaatgttggtcgtatctttatctggtctgcggctctgtccctgtttcctggataggagactacgtctgtatcttgtatcacaggaggcaccttcttcctgtttcctggcacagacttgtaagtgaatttcctgcccgcctccgcccacagcgtaagccgcgctggaacagctcacttattgccccagatgtatgtggagtaaccgccttcagtttcctggttctgagtttccgtgttactcaagcaatgcttctgctgaatttgtctttttttttttttttttgagacagagtcttgctttgtcgcccagactggagtgcaatggcgtggtctcggctcactgcagcctccacctcctgggttcaagcgagtctcctgcctcagcctcctgagtgtgcaacttatctttttattttatttatttataattttttggctaattttggctattttgtgtctgtgtgtgtatttttagtagacatggggtttcaccatgttgggcaggctggtctcgaactcctgacctcaggtgatccgcccacctcggcctcccaaagtgctggaattacaggcgtgagccaccgcacctggcctatttatttatttatttatttgtgactgagtctcgctctgtcacccaagctggaatgcaatggcgtgatctcggctcactgctacctccacgccccaagtttaagcaattctcctgcctcagactcccgagtagctgggactacaggtgtgcaccaccacatccagctaattttttgtatttttagtagagatggggtttcaccatgttggtcaggctggtctcgaactcctgacctcaagcgatccacccaccttggcctcccaaagtgttgggatacaggcgtgagccactgcacctggttgaatttctccttttaattggaggtttcattttatttttctttatttatttttttgagacgaagttgcactcttgttgcccaggctagagtgcagtggcgcgatctgggttcactgcaacctctgcctcccagatgcaagtgattctcctgcctcagcctcctgagtagctgggaatacaagcacccaccaccatgcccagctaatttttgtacttttagtagagacaaggttttgccatgttggccagggtggtctcaaactcctgagctcgtgatctgcccacctcagcctcccaaagtgctgggattacaggcgtgagccaccgtgcctggtctctttctttattttttattttattttttgacaccagatctgctctgttactcaggctagagtgcagtggcattgagaggtgacaacctgctagcagcccttgcttgctcttggcgcctcctcggcctcggtgtctgctctggccgggctcgaggagcccttcagcccactgctgtgctgtgggggcccctctctggggctggctgaggccggagccgtctccctctgcttggggggaggtgtggagggagagacgccagtgggaacaggggctgcgcgtggtgctcccgggccagtggtgttccgggtgggtgcgggctaggcaggccctgcactgggggcaaggttggcgtcgcctgctgggcttgatgggggggtgggggaggagcgccctctgggctgccggagtgccccactaggcgcggcaaagtcccaggagtgccattgagaggtgaagccagctgggcttctgggtcgggtggggacttggagaacttttgtgtctagctaaaggattgtaaatgcaccaatcagcactctgtgtctagctaaaggattgtaaacgcaccaatcagcactctgtgtctaggtaaaggattgtaaacgcaccaatcagcactctgtgtctagctaaaagtttgtaaatgcaccaatcaccactctgtgtctagctaatctggtggggatttagagaacttttgtgtctagctaaaggattgtaaactcaccaatcagcactctgtgtctagctaaaggattgtaaacacaccaataagcactctgtcaaaacggaccaatcagctttctgtaaaatgaaccaatcagctctccgtaaaatggaccaatcagctctctgtaaaatagaacaatcagcaggatgtgggtggggccggatgggggaataaaagcaggccacccaagccagcggcggcaacatgctcgggtcctcttccacactgtaaaagctgctttgttcttttgctttttgcagtaaatcttagtgctcctcactctttgcgtctacgctgcttttatgaactgttaacactcactgtgaaggtctgcagcttcactccttaagccagcgagaccacaaacccactgggagggataaacaactccagacgggaggaacaaacaacttcgggtgcaccacctttatgaactgtagcactcactgcgaaggtctgcagcttcactcctgaggccagcaagaccacgaacccaccagaaggaacgaacaactccagatatgccacctttaagggctataacactcaccgcggaagtctgcagcttcactcctgaagtcagtgagaccatgaacccaccagaaggaagaaactctggacacatctgaacatctgaaggaacaaactctggacacaccatctttaagaactgtaacactcaccgcgagggtacacggcttcattcttgaagtcagcgagactaagaacccaacaattccggacacagcatgatcttggttcactacaacctggatctcccagagtcaagcaatcctctcgtctcagtctcccaagtagctggaactacaggtgtgtgccaccatgccccactaatttttgtatttattgtagagacggtttcagcatgttgcccaggctggtctccaactcctggactcaagtgatcctctccacctaggcctcccacagtgctgggattacaggaatgagccaccacgcccggcctaattggaagttttagagtgcagtggggatcacgtgcgtagaggttactgctgccttaattaaaggagacaacatgtttcataaaacttggaaattgtagagggtgtggggaaccactcaaattcagaatatcaaaacagaactttattttttgtgtatttgttgccaatctttttccctacatatgtaatgtttgtttgtttgacatgactaccatttctgttttcataatatgtttaatacttttcctccacttaacaaacatggctacgatttgccaagttgctgatcatccttttttttttttttcgagacagagtttcacccttgttgcccaggctggagtgcagtggcagatctcagctcactacaacctctgcctgctgggttcaagtgattctccagcctcagcctcccaagtagctgggattacaggtacccgccaccactcctggctaacttttgtatttttagtagagacagagttttgtcaggttggccaggctggtctcaaactcctgacctccagagatccacccgcttcagcctcccaaagtgctgggataacaggcgtgagccactgaacctggcccagatcatccttttaagtgttctttttcatttgtaggtttaacattggctttggggtgagaaagaaaccaagactcacccagagtcataagcccaacaagagaatgggtctgtctgggctagccctgggctactggatgagcagggttggccttttcattctctgagtcttcgtttctctggcctttacatttctctggagggacttttcattttctctggaaaccaactccaagtgcacttttccagaaggcatttttgtaatgcctggttggctgcatgcgacctctggttttcctccttcaccctttcctgctcagtcactgcattttctgttctcaaaagaaccctctcatatagcacgtgcagagagcagtagcgagtcaggctgtcccgcggtgtgtgtccggactcctgtgtgctctggcagtggggccagtgggctgggaagagttgcaggagaaacccagtgggagagaaagactccaacctgggaacctcggggcatctggtagcgccagaatgactttccaaaattttggttggggcagtcacaggcccctgctcgccacggtggcctctggcaaagaaacacatgtggggcagacaagagggatgctcgccaatctcctctgaattttgcaaccctgtgtgttaaaaacaggtatttctggtctttaaagacacttggaaaagacagacttgttgaatacttagaaaggccaagccacagccagaagcttggtgtctgggatccatcatctctaaggttttaaaagcatcttgctggaataggaacagctccggtctgcagctctcagcaagaccaacacagaagatgggtgatttctgcatttccagctgaggtacctggttcatctcattgggactagttggacagtgggtgcagcccatggagggcgagccaaagcagggcagggcatcgcctcacctgggaagtgcaaggggtcaggggatttccctttcctagccaagggaagccgtgacagactgtacctggaggaacagtacactcctgcccaaatactgggcttttcccatggtcttcacaactgacagaccaggagattccctcccgtgcctggctcggtggggctcatgcccatggatccttgcttactgccagtgcagcagtcttaagattggcctggcatgctgcagcttgttgggggggtgggagggcgtccgccattcctgaggcttgagtaggcagttttatgctcacagtgtaaacaggccgggaagcttgaactgggtggagcccactgcagctcagcaaggcctactgcctctctagattccacctctgtgggcagggcatgtcagaacaaaaggcagcagacagctttggcagacctaaacgcccctgtctgacagttctgaagagagcagtggttctcccagcatggcatttgagctccgaaaatggacagactgcctcctcaagtcggtccttgacccccgtgtaccctgactgggagacacctcccagtaggggccaacagacacctcacacaggcaggtgcacctctggaacaaagcttccagaggaaggatcaggcagcaatatttgctgttctgcagcctccgctagtgatatccaggcaaacagggtctggagtggacctccagcaaattccaacagacctgcagctgagggtcctgactgttagaaggaaaactaacaaacagaaaggaatagcatcaacaccaacaaaaaggacatccacaccaaaaccccatctgtaggtcaccaacatcaaagaccaaaggtagaaaaaaccacaaagatgggaagaaaccagagcagaaaagctgaaaattccaaaaaccagattgcctcttctcctccaaaggatcacagctcctcaccagcaagggaacaaaactggatggagaatgagtttgacaagttgacagaagtaggcttcagaaggttggtaacaaacttctccgagctaaaggaggatgttcaaacccatcgcaaggaagctgaaaaccttgaaaaaaggttagacaaatggctaactagaataaacggtatagagaagaccttaaatgacctgatggagctgaaacccatggcacgagaactacatgactcatgcacaagcttcagtagctgattcaatcaagtggaagaaagggtatcagtgattgaagatcaactcaatgaaatagagcaagaagacaagattagagaaaaaagaatgaaaagaaatgaacaaagcctccaagaaatatgggactatgtgaaaagaccaaatctacatttgactggtgtacctgaaagtgacggggagaatggaaccaagttacaaaatactcttcaggatgttatccaggagaacttccctaacctagcaaggcaggaaaacattcaaatttaggaaatacaaagaacaccacaaagatacttcttaagaagagcaactccaagacacacaattgtcagattcaccaaggatgaaatgaaggaaaaaatgttaagggcagccagagagaaaggtcgggtcacccacaaaggggagcccatcagactaacagcagatctctcagcagaaaccttacaagccagaagagagtgggggccaatattcaacatttttaagaaaagaattttcaaaccagaatttcatatccagccaaactaagcttcataagtgaaggagaaataaaatcctttacagacaagcaaatgttgagagattttgtcaccaccaggcctgctttacaagagctcctgaaggaagcactaaccatggaaaggaacaactggtatcagccactgccactgcaaaaacatgccaaagtgtaaagaccattgacactatgaagaaactgcatcaattaatgggcaaaataaccagctaacatcatagtgacaggatcaaattcacccataacaatattaatcttaaatgtaaataggctaaatgccccaactgaaaaacagactgacaaattggataaaaagtcaagacccatcgttgtactgtattcaggagacccatttcatgtgcaaagatacaaataggctcaaaataaagggatggaggaagatctaccgagcaaatggaaagcaaaaaaaaaatcaggggttgcaatcctcgtttctgactaaaaaaaaaaaaaaagatttcaaaccaacaaagatcaaaagagagaaagaagggcattacataatggtaaagggatcaattcaataagaagaactaactatcctaaatacatatgcaccccaaacaggagcacccagattcataaagcaagtccttagagacctacaaagagatttagactcccacacagtaataatgggagactttaataccccactgtcaatattagacagatcaatgagacagaaggttaacaagcatatccaggacttgaactcagctctggaccaaggggaccgaatagacatctacagaactctccaccccaaatcaacagaatatacattcttctcagcaccacatcgcgcttattctaaaattgaccacataattggaagtaaaacactcctcagcaaatataaaagaacagaaatcacaacaaactgtctgtcagaccacagtgcaatcaaattagaactcaggattaagattcactcaaaactgcacaactacatggaaattgaactacctgctcctgaatgactactgggtaaataatgaaatgaaggcagaaataaagatgttgtttgaaaccaatgagaacaaagacacaacataccagaatctctgggacacatttaaagcagtgtgtagagggaaatttagagcactaaatgcccacaagagaaagcaggaaagatctaaaatcaacaccctaacatcacaattaaaagaactagagaagcaagagcaaacacattcaaaagctagcagaaggcaagaaattactaagatcagagcagaactgatggagatagagacacaaaaaacccttccaaaaaatcagtgaatctaggagctggttttttgaaaagatcaacaaaattgatagactgctagcaagactaataaagaagaaaagagagaagaatcaaatagacacaataaaaaatgataaaggggacatcaccaccaatccctcagaaatacaaactaccatcaggaatactataaacacctctacacgaataaactagaaaatctagaagaaatgaataaattcctggacacatacaccctcccaagactaaaccaggaagaagttgaatccctgaatagaccaataacaggctctgaaattgaggcaataattaatagcctaccaaccaaaaaaagtccaggaccagacggattcacagccaaattctactggaggtacaaagaggagttggtaccattccttcggaaactattccaatcaatagaaaaagagagaatcctccctaactcatttcatgagaacagcatcatcctgataccaaagcctggcagagacacaacaaaaaaagaaaatttaagccaatatccctgatgaacatcaatgcaaaaatcctcaataaaatactggcaaacgaaatccagcagcacatcaaaaagcttatccaccatgatcaagccggcttcatccctgggattcaaggctggttcaacatatgcaaatcaataaatgtaatccatcacataaacagaaccaacgacaaaaaccacatgattatctcaatagatgtagaaaaggccttcgacaaaaattcaacaacccttcatgctaaaaactctcaataaactatgtattgatgacgtatttcaaaataataagagctatttatgacaaacccacagtcaatatcatactgaatgggcaaaaactggaagcattccctttgaaaattggcacaagacaaggttgccctctctcaccactcctagtcaacatagtggtggaagttctggccagggcaatcaagcaagagaaagaaataaagggtattcaattaggaaaagaggaagtcaaattgtctctgtttgcagatgacatgactgtatatttagaaaacaccatcatctcagcccaaaatctccttaagctgataagcaacttcagcaaagtctcaggacacaaaatcattgcacaaaaatcacaagtattcctatataccaataacagacaaacagagagccaaatcatgaatggactcccattcacaattactacaaagaaaataaaatacctaggaatccaacttacaagggatgtgaaggacctcttcaaggagaactacaaaccactgctcaacaaaataaaagaggacaaacaaacggaagaacattctatgctcatggataggaagaatcaatatcgtgaaaatggccatactgcccaaggtaatttatagattcaatgccatccccatcaagctaccaatgactttcttcacagaattggaaaaaactactttaaagttcatatggaacaaaaaaagagcccacattgccaagacaatcctaagcaaaaagaacaaagctggaggcagcacgctacctgacttcaaactatagtacaagactacagtaaccaaaacagcatggtagtggtaccaaaacagatatatagacaaatggaacagaacagaggccgcagaaataacaccacacatctacaaccatctgatctttgacaaacctgataaaaacaagcatggggaaaggatttcctgtttaataaatggtgctgggaaaactggctagccatatgtagaaagctgaaacaggatcccttccttacactttatacaaaaattaactcaagatgtattaaagacttaaacataagacctaaaaccataaaaaccctagaagaaaacctaggcaataccattcaggacataggcatggataaatgcttcatgactaaaacaccaaaagcaatggcaacaaaagccaaaatagacaaatgggatctaattaaactaaagagcttctgcacagcaaaagaaactatcatcacagtgaacaggcaacctacagaatggggaaaaattttgcaatctacccatctggcaaagggctaatatccagaagctacaaagaacttaaacaaatttacaacaaaaaaatcaaacaaccccatcaacaagtgggcgaaggatatgaacagacacttctcaaaagaagacatttatgcagccaaaagacatatgaaaaaatgctcatcatcactggtcaccagagaaatgcaaatcaaaaccacaatgagatgccatctcacgccagttagaatggtgatcattaaaaagtcaggaaacaacagatgctggagaggatgtggagaaataacacttttacactgttggtgggagtgtaaatcagttcaaccattgtggaagacaatgcagcgattcctcaaggatctagaactagaaataccatttgacccagccatcccattactgggtatatacccaaaggattataaatcatgataaggacacatgcacatgtatgtttattgcggcactagtcacagtagcaaagacttggaaccaacccagatgtccatcaatgatagactggattaagaaaatgtggcacatatacaccgtggaatactatgcagccataaaaaaggatgagttcatgtcctttgcagggacatggatgaagctggaaaccatcattctcagcaaactatcacaaggacagaaaaccaaacactacatgttctcactcataagtgggagttgaacaatgagaatacacagacacagggcagggaacatcacacaccgaggcctgtgggggggttgggggttagggaagggatagcattaggagaactacctaatgtaaatcacgagttgatgggtgcagcaaaccaccatggcacaggtatacctatgtaacaaacatgcatgttgtgcacatgtaccccagatcttaaagtataataaaataaaaaataaaaaaaatcttccctactttttaaactgtatgttgctttgtagcaatacattatgcacattataaagtgttttaattagaaattttagaagatatgataaagaaaaataatttaaataacaatttttattcaaaatacaaataatagggctgggcgcggtggctgacgcctgtaatcctagcactttggcaggccgaggcgggcagatcacgaggtcaggagttcaagaccagcctggccaacatggtgaaaccctgtctctactaaaaatacaaaaaattagctgggcgtagtggcggatgcctgtaatcccagctactcgggagactaaggcacaagaatcgcttgaacccgggaggcggaggttgcagtgagccgagatcgcaccactgcactccagcctaggcgacagagtgagactgtgtctcaaaaaagaaaaaaaaagaaaagaaaagaaaaagaaaaaagaatattttgcccttataacattattaattatatactttcaagtgagagcaatatgactaattatgcttaattatttttgaaaatgatgctttaacaatttgtaatgcagacatttgatggtctggttctatgttgagttcatgttgatacttggtcttaaggacagttagagctgataaaaataacttgtgcatagaccaggcgcggtggctcacgcctgtaataccagcactttgggagtctgaggcgggcggatcacgagatcaggagatggagaccatcctggctaacacggtgaagccccgtctctattaaaaatacaaaaaaaattagccaggtgcggtggcaggcacctgtagtcccagctacttggaaggctgaggcaggagaatggtgtgaaccttgcagtgagccgagatcacgccactgcactacagcctgggcaacagagcgaaaccccgtctcaaaaaaaaaaaaaaaaagaaaaaaaaaaagaaataacttctgcacacatcataacgttcatacataatgaatcattgatatactcattaaaatgtgactcatccaggaaaatcccatccctaaattatttaaagtttttgttttccctcagctactatatttctgttctaccttatgcaaactaatgagaaaccattgtcccaagactggtggcctcctggcatggttgtgcaacagctgttgtcaaactccagagtctaaagtgcaccacgaaagccagatggcaggccagatccagcctccctgctaaatgaaatgttcactggccagggagaaacaaccacgtggaaaattaaataaacccatgacatttgtagccagcagctcgggtgttttgtagggttttccctgagaagtggggactaatcgcatgaatcactttttttttctttttagagtcttatctatttgtgagtaaatgtttccaattaaagcattgctactaagcctcagttttctcacctctaccatggagttaaaatgtctacttcacactgtccataaaagaattaagatggccgggcgcggtggctcacgcctgtaatcccagcactttgggaggccgaggcggacggatcacgaggtcaggagatcgagaccatcctggctaacacagtgaaaccccgtctctactaaaaatatgaaaaactagcctggcgtggtggtggacgcctgtagtcccagctactcaggaggctaaggcaggagaatggcgtgaacccaggaggcggagcttgcagtgagcctagattgtgccactgcactccagcctgggcgacagagcaagactccgtctcaaaaaaaaaaaaaaaaaaaaaaaaaaaaaaaaaaagccaggcatggttggtggctcacacctgtaatctcagaactttgggaaacaggcaggatcacttcagcccagaagtgtgggaccagtctgggcaacatagtgagatcctgtctcttaaaaaaaaaagaaaagaatcaaaataaaacaagaaaacaaaaacacagaacaagtgcatcatcatagtggtgacaatttttaggaaactttttttgtttttttctgtgtgaacctaactgatctaataagggagtgtgtgaacatttccatgttggtccattttttatgtgcctaaatggacaaattcacccaggacctggctgctggactcatccttaggaagaataaagaaaaaggaagtttatctctagcatctttctcttgcccttgttttcttcctggccacagtcatgccctggatttcagtgtctctaaacatctagcagcctctcacccagcataacccctgttgaggtccagggcacgatggtgggagtgggtgcagaagagacagagagaccactggtttgagtgtctagggtttgggtcctcaggaagaacttggcccggcgcggtggctcacgcctgtaatccaagcacttcggagaccgaggcggttggatcacctgaggtcaggagtttgagaccagcctggccaacatggtgaaacaacgtctctactaaaaatacaaaaaattagccaggcgtggtggcaggcacctgtaatcccagctactcaggagcttgaggcaggagaatcacctgaactcgggccgcggaggttgcagtgagccgagattgcgccagtgcactccaccctgggcaacaagagtgaaactccgtctcaaaaaaagaaaaaaaaagaagaacttcttgacttgactcagcaggactttttccatgggtctagagctaggtgtgaagagagtgagctcgtggtgagaggaacttgttcatcaaaaggagtccatgcccagtggcagaagtggagaggtgggtatgggacacacagggaagctgctctcttctgttgtctgtggcttctgttggaggatgtgctgtgggaatgcaaggaggagatggaaggaaggtgtcaatatagctttaacaaaggaaaaaaaaatgaaaacaccgaaaccacccttgcaaaaattgtaacagtgagaaaattatgacattgaaagatatccaatctaacccaactccttcttgcctttaacctccaaattgcacttagtcattcctgagcaaaggccaagctaactttgggagaaatttcgtttacagtttaaatgataatagcccttcccaaaactaacctgtctttgtaaaaatgatgaaaggccaccaggttagggaggatgagaggggcctgaatgcaggcttagataaacaattacccgccattgtttcagaggtcacaagatttgtaacttccccaattagtcctgtaaaatgatatcactgtggccttttgagatgtctttgcagttattttttgttttgtttgctttgagacaaggtcttgctctgtcaccaaggctggagtgcagtgatcatagctcactgcagtctctatctcctgggctcaagtgaaccttccacctcagccttccaagtagctgggactgcaggtgcatgccaccatgcctggccagttttgttgttttttggttctggggtgttttttgcttgtttgtttgttttgtttttgtatttttagtagacatgatgtctggctctgttgttcaggctggtctcaaactcctggactcaagcgatcctcctgcctcagcctcccaaactgctggggttacaggcacgagccaccttgcccagctcaggcttttccattttggaaaaccagatgactccacccagatccaagaccggtcctatggccccactcagaagtggactcagtgcacgaggaccattttccacatccctatgattgcatcccaatcaatcagcagcacccattccctagccacctgcccagcaaactatctttttttttctttttttcttgagactctgtcgcccaggctgtagtgcagtggtgcaatcatggctcacagcagcttcaacctccctggcccagcctcccaagtcactgggactacaggtgtacaccaccacacctggctaatttttaaattttttgtagagatggtgtcttgctgtgttgtccaggctgatctcaaactcaaggactcaagcaatcctcctacctcagactcgaaaagtgctgggattacaggtgtaagctgccatgcccaatccaaactatcttgaaaaagccttcaaatttgagaggaggctgatataagtaataataagacttcagtctcctgtttaactggctctatgtatataaaactctttctctattgcaattcccctgtcttcataaattggctctatctgagcagcaggcaaaatgaaccaattgggtggttacaacagtatcagcatatacagtagaattgtaatatccatcatataccaactgcaaattaattttaaaagatatattgttaaaagcatataagtgatataagtaatttacagaagaataaattcaattgaacaataaatatgaaattattttcaacccctccagtcatatagtaaaagtaaattaaaactttttttttttttagacagagtctcactctgtcgcccagggtggagtgcagtggcgcgatctcagcccaccgaaacctctgcctcctgggttcaagcgattctcctgcctcagcctcctgagtagctgggattacaggcgcccgccaccatgcccggctaatttttgtatttttagtagagacgaggttccaccatgttggccaggctggtctcgaactcctgatctcaagtgatccatcaaccttggcctcccaaaatgctgggattacaggcatgagccactgcacccagcttaaaacaatgttttaacctcttgttgataagagtgtaaacttatcacctttgggggaagtaatttagtacctattaatattaaacattttcataacctttgatttagcatttccacttaaattagtgccttagttagtttgggctgctataacaacaccacagcctggatggcttatagacaacagaggtttatttttcacagttcttggggctgggaagttcaggtatcaaggcactggcagttaaggtgcttggtgaaggtcctttttctgttcccagttcacagatgtcccaccttcattttctttcttttccttctttttctttctttctttttctctttctctttctttctttctctctgtctttcttccttctttcttctttctttctttttttttttttttttaacagatgagggttttctctgtcacccaggtggctggagtgcaatggtgtaagcttggctcactgcagcctcaacctcctgggctcaactgatcttcccacctcagccgcccgagtagctgggactacaggtgcatgccaccaggcccagctaaatttttgtaattttgtagagacgaggtctcattatgttgcccaggctggtcttgaactcctgggctgaagcagtcctcccacctcggcctcccagatgctgggattacagacgtgagccaccacacccggcccatcccaccgccttgctgtggcagggagagcaatagcctctcttcatctctttataagggcaccaatcccattatgcccccatgactttatccaaacctcattatagcccaggccccacctccaaagactatcacattgggaattagagagcttcaacatacagtttgaggggactacaaacattccattcatggcaactaggaatttatagaaacactccctctagtgtgcaaaaaagtaagtacaagaatttttggggtttttttgttttttgttttgttttgttttgttttgttttctgagacagggtcttgctgtcacccaggcatggtacagtagcataatcacagctcattgaagcctcaacttcccaggctcaagcaatcctccccgctcagcttcccgaatagctaggactataggcatacaccaccacacccagctaattttttttttttttttttgagatggagtctcgctctgtcacccaggctggagtgcaatggcacgatctcagctcatggcaacctccgcctcctggattcaagcagttctcctgcctcagcctcctgagtagctgggactacaggcgcatgccaccacacccagctaattttcatacttttagaagagacagggtttcaccatgttggccaggctggtctcgaactcctgacctcgtgatccacctgcctcagcctcccaaagtgctgggattacaggtgtgagccaccgcgcccagcctaatttttgtattttttgtagagatagggtttcaccatgttgcccaggctggtttccaatatctgggttcaagcaatctgcccgcctcagcctcccaaagtgctgggattagagatgtgagccacggcacccacccaagaatgtttttttgaggcattatgtctactagtgaataatgggggggggccgtggggggagtaccagaatagttaaagtaggctgtgtatatacaatgaaatatcacagtatcattttgtaaagatctatatgtattgacatgggaaaatgagcacatcataaataaataataaaagttgcagaacaatataaactggaagaaacatttttttcaatcttcccctccatccatctttgctgatatataaacaggaaaaagttgggggagagaatacaggaacacggaacaaacagtaaacaatggttatctcatagacgtgattggcggcatttttggttttggttttctttttgagacagagtttcgctctctcacccaggctggagtgaagtggcacgtttttggctccctgcaacctccgccccccaggttcaagcgattctcctgcctcagcctcctaagtagctgggattataggcacctgccaccatgccgggctaatttttgtgtgtgtgtgtttttttcagtagagacggagtttcactatgttggccaggctggtcttgaactcctgacctcaggtgatctgcccgcctcggcctcccaaagtgctacgattacgggcatgagccactgcaccctgccatagagggcatttttgctttctgagttagtcagggttctccagagaaatagaatatacatacatacgtacatacatacatacttgcagagagagaaagagagagtgtgacttattttaaggaattagttcacaaaattgtggaggcttggtgagtccaaagtctgataggagagcccagcaggctggagacacaggaaagagttgcagttcaagtccaaaggtggtgtgctggaaacttctgaccagaacaaaagagagaggacagccttttgttctaaccaggtcttcaactgattggatgaagcccaccctcattacatttaaagttcaccaatttaaatgtaaatctcatccaaaaacaccttcacagaaacatccagaataatgtttgactaaatatctggacaccatggcccagacaagttgacacataaaattaaacatcgtaatgagatctgctgctatctatgaatttatgtttctagtgtatttgtaaggtacatggatcattcctttatttctctctctatatatatagatatatatatactttttataatcataaatatgtgtatgcatgcatatgtatgtataagaaaatatatatacatatagacataaaattatgcatttgtgctaggtacttgtgatggttaattttatttgtcaacttggctaagccatggtattcagatatttggtcaaacattgtggatggttttgtgagggtattttggatgtttcaaattggtgcattttgaataaagcagactgccctccacaatgtgagtgggcctcatccaatcattcaaaggcctaagacaaaaagactgaggtccctgaggaagagggaattctgcctccacaccgcctttggacctgagctgtaacatcaactctttgctgctggcctgcctgctctgcagattttggatttgccaacccctatgatagcatgaaacagttctttcatctgattggttctaactctctggaacaccctaactaatacagtgctgttataggtactgagaatagagtgatcaacagggaagaaaacgtgctgtcttggggccttgctggcgggtggatggtagacactcaattgtgtgaggctcattggccatagaggaactcatgcaggagaaactcaccttgcctaggttgaaaggaggggaatcaggcacatattcccctctgaggaatatgtcagcagagactggatgtggcaagactacaggtggcgggtaggtgggacagagtattccagaccagggaacaaaaagggataaaagtcttggggtggaaaggacatgtttgagaaacagaaataagaccaggtgctgggaccaggagtcctacactcatcacactcagttactcatggggtgacttcagaagccctaaaagattttgtttcccaattttttttttttttttgacaagatcttgctctgttgcccaggctagagtgcagtggcacgatcatagctcacagcagcctcaatctctcgggctcaagtgatccacccacctcagcctcctgagtagctgggactacagatgaatgcatcatgcccagccgatttcttttgtttgtttgagatggagtctcgctctgtcaccccgagtggagtgcagtggcataatcttggctcactgcaacctccacttcccaagttcaagctattctcctgcctcagcctccctagtagctgggattacagatgcccaccaccacacccagctaatttttgtattttgagtagggacggggttttgccatgttggccaggctggtctcgaactactgacctcaagtgataacgcccgcctcagcctcccaaaatgctgggattacaggcatgagccactgtgcctggcccaatgcaattttaagatgattttatgtatattgtaggagagaaaaataggtaaatatattaagagtattaagagccaaggctttcgattgccctgataaaagatatacaaatacaaagtccaagaagagggaaaaacctataatgtacaatttgaattggaaataccaatatgaattcatgattttttttaaaccctaaatgtgacttaaagcgatgacacctctgtagcaacgagctctcccagcactaaagaccattcctcactaaaacgaatcaatgttccttagaaagatggctgattttggccgggtgcagtggctcacgcctgtaatcccagcactttgggaggccgaggcgggcagatcacaaggtcaggagatcgagaccatcctggcgaacacagtgagaccctgtctctactaaaaatacaaaaaagtagacaggcatggtggtgggcacctgtagtcccagctacttgggaggctgaggcaggagaatggcatgaacctggggacagagcttgcagtgcgctgagatcacgccactgcattccagcctgggcgacagagcaagactcggcctcaaaaaaaaaaaaaaaaaaaaaaaaagatggctgattttggccaagtgcagtggctcatgcctgtaatcccagcaatttgggaggctaaaggcaggcagatgcagatcacttgaggccaagagtttgagaccagcctggccaacataatgaaaccccatctctactaaaagtacaaaaattagccaggcgtagtggcaatgcctataatcccagttactcaggaggctgaggtgggaggatcacttgaactctggaggcagaggttgcagtgagctgagatcatgccactacacttcagcctgggtgacagagtgagactctgtctcaagaaaaaaaaaggaaagaaagaaagaaaaaagaaaaagaaaaatggctgattccacatctggagctgggaaagtaaaaaaaaattgtgcctgggacatctagttgtgtcaaaagcaagcaagtgctcacagaacttttggggtatgtcagaatggatgtaggagttagcttaaaagggctcccactggggccctctcccaatctagatcattctggccaataaggtgaaaccccgtctgtactaaaaatacaaaaattagctggccatggtggcatgcacctgtagtcccagctactcaggaggctgaggcaggagaattgcttgaacccaggaggcagaggttgcagtgagccgagatcgtaccactgcactccagcctggtgacagagtgagactccatctcaaattaaaaaaaaaaaaaaaggctcccactggacacataaggtacagttcgagcacaaaaaaataatgactgtaaccaattgtgaaatattaaatggatacctggcatggtgtagtcccagcactttgaggccaaggcaggtggatcacttgatctcaggcaacatggcaaaaccccatctctacaaaaaatacaaaaatcatctgggtgtggtggcatgcacctgtggtcccagctactcaggaggctgaggtaggaggatcacttgagcctggcaggttgaggctgcagtgagtggtaattgcgccactgcactccagcctgggcaacagaccgtgatgctgtctcaaaaaataaaagaaatactgaatggataaaaaccctaaatctatagtttaaaaaaagaaaaaaaataaattttctacctttggagattaatatcataccaataccttattctgaaaactggtaaagggaaataagcatttaccttgccttttagaaggaccctactttggccgggcgctgtggctcatgtctgtaatcccagcactttgggaggctgaggcaggtggatcacttgaggtcaggagtttgagaaggaccctactttttccagttggtgagagaaagctccttcctaggtaattatgcccttataaatgtagaagtgggagaattagaaaagcaccttttgtaatttctgatgaaataaccaattcaagcaagaatcactgtagatggcgataagagaaagtttttcagcgtatacacacagtgtcaaagaaccatgcagacgacttgctaattgccaagagggaaacataacctttacagaaaagatctgaccgtgtccatcctaaccaagcaatcatacttagcatcactgcttgtgggatggcttcatatcatatgccttctgatgtgaggcaatgtgacatatatagcaagtttgaggaattagtcccaagactgggtaacctgaatctaaccaagtaattgggggaaaacccctcaaaactcagggagacagatgaacacattaagtgacatcaaagaaacagtaagacaaatctagaatgttgaacagtctaaaagacaactgccctagtatcctcaaagatccaattccaagaagaaaaaaactggatgattgtagattaaaaagaaaggggtgagaaaaggacataaaaaaatgcaatgttgaaacttgattggttcctgttctgggagttttttaaaagctatatattaaaacatcatgctatacaccataaatctatacaatttttatttggtaattatacttaggaaaaattaaatgctataaaaggcattcaaattggagaagtttaatgctagatgacattaaaaattattaactcattaaacatgatgattctattatgattgtgtaagagatgtatatgacgtatttaggggtgaatggtcatgatgtctgcaagtttctttttttttgagatggagttttgctctgtcacccaggctagagtgcagtggcactatcttggctcactgcaacctccacctcccaggtttgagcaattttcccacctcagcgtcctgagtagctgggatcataggcatgtaccaccatgcccggctaattttttgtatttttagtagagacggggtttcaccatgttggccaggctggtctccaactcctggcctcaggtgatccgcctacctcggcctcccaaagtactgggattacaggtatgagccaccatgcccagccgatgtctccaactttcaaatggttcagggctgggtgcagtgcaatcccagcactttgggaggccgaaggaggcggatcacctgaggtcaggagtttgaggccaccttggccaacgtggtgtaatctcgtctccactaaaaatacaaaaattagccaggcatggtggtgcacacctgtagtcccagctaatggggaggctgaggcaagagaatcacttgaacccgggaggcagaggttgcagtgaaccaagattgcaccactgcactccaacctgggtgacagagcaaaactccatctcaaaaagaaaaaaaaaagttcaaatggttgagaaaagacaacacttgtatactgttggtaggaatgtaaattagtacagctattatggaaaactgtatggcggttcctcaaaaaactaaaaatagaattaccatatggggctgggcacagtggctcacacctctaatcccatcattttgggaggccgaggtgagcggatcacctgaagtcgggagctcgagaccagcctggccaatatggtgaaaccccatttctactaaaaatacaaaaattagttgggcgtggtggtgggcgcctgtaatcccagctacttgagaggctgaggcaggagaaccgcttgaacccgggaggcggaggttgcagtgagctgagaccgtgccatcgcactccagcctgggcaacaagagtgaaactccatctcaaaaaaaaaaaaaagaattaccatatgatccagcaatcttgcgtctgggtatttactaaagagatttgaaatcagtatgtcgaggagatacctgcactctcatgttcgctgcagcactattaaccacagtgaagttacatagtcaaaccgagtgttcatcagcagatgaatggataaagaaaatatggtatataggccgggcgcagtggctcaagcctgtaatcccagcactttgggaggtcgaggcaggcggatcacgaggtcaggatatcgagagcatcctggctaacacggtgaaaccccatctctactaaaagtacaaaagaattagctgggcgtggtggcaggcgcctgtagtcccagctactctggaggctgaggcaggagaatcacttcaacctgggaggcggagtttgcagtgagctgagattgcaccagtgcactccaacctgggtgacagagcaagactccgtctcaaaaaaaaaaaaaaaaaagaaagaaagaaagaaaatatggtatatataccgtggaatgctattcagcctttaaaaagaaattttgtcatttgagacagcgttaatggaattggagaacattatgctgagtgaagtaagccaggcacagaaagacaaatactgtatgttctcacttataagtggaatctaaaacaatcgaacttaaaggaggagagagcagaatagtagttaccagaggctgggggtctggggtaaatggggatatgatggttaaaggttacaaagcttcattggactggaaaaataagcttttctttttctttgagatatactgcacagcaaagtgaatatagtaaataattcttggacatttcataagtgttgagggtaaatatcttttttacatttttaacatattccctcctctgaatgtagagagtaaatttcaaacattctcaccacaaaaaaagtaagtatttaaaagtgatagatgttgggccgggtgcagtggctcacgtctgtaatcccagcactttgggaggtggaggtgggtggatcacctgaggtcaggagttggagaccagcctggccaacatggtgaaaccccgtctctactaaaaatacaaaaaattagccgggcatggtggcggacgcctgtaatgccagctactcgggaggctgaggcagaagaatcacttgaacccgggaggcggaagttgcagtgagccgagattgcaccactgcactccagcctgggcaacaagagtgaaactccatctcaaaaaaaaaaaaagtgatagatgttaatttgcttgatttaatcatcccacagtgtattcatgaatcataacatcactttgtacgccataaatatatacaactataatttgccaatttacaattaaaggttaaaatttttaaaaataaaaggtaatgacaacaaaaaaaatggataagtagacagaaaaatcgattaatacagaagctggcaaaaactagtaaagcaaatatggcaaaatgtagaatttgttgaatctttcagtatttgggtgtttattgttctttttctatgttagaaatttttcaaaataaaaagttgcaaatgatttccatattattctgatttttacacagtaacagaaaacattcctggctgcagctcattaatatttcttctttgttctcctgaggaatcaaaagattctcatttatgatatgtcaaaaggcacataaagaaacatatccaaactttgttgtctcttcattcaagtttggctttaatattttattaaaaatttttgtatttgtaaatattaaaacactgaaacttgctactgacacaagaacgacaatgcactaacaataaaatcaaagtagaagctaaactattcagaagcagtagcaactccatgattccaaggtaatttaaacaggcaatttcagagtgcttcaagatgaaggcgcaaagcagcctctcagcctgcagtgatgctacgacaccggcagatggcgctgcaaagcttctcaaatgcagcgggaagtccatttaccaacggctgttgcgatctcttaattagcttgaactgagtttgtattagaatttataatttttactgcatattgcagttactcgtatattactgacactggaacagacatgttttaacaaactggttgagccgtatcagtgcgaaccagctgaatgtcagcgctgttccctcctgtgacagaagccaccggcgcctgcctgagggcactcccctcactgggactctcagtaccacgcccacctgtccccaaggtttgtttcatcactaagccccaccttccagcattttcacctttctccttcacttgatccttcttcctaacatcgtgttaacacactccaaactaaaaaagttcctcaactgcatatactctgctccctccatttttttctttcattgcaatcactgccaaacattttgaaaattctctcctcacctccactgcctttacgcttttcctccaaattattccttaaccctctgacatctggggcttctgattccacctctccaaagaaatgctcccaccaagaccatggaggcccctctcgttgctggtggatactcgttcattttccccgccaccacccatcagcagcgttccacgccgcccttccttccttccttcctcccctagcttcatcacaccacgttactaggtttttcctgtctcactggctcctttccctgctctcctttttatatgtttcctgctttcttcctcagccttctctgctccccacacctatatgttgatgatgcccaaatctctgtctccagccacgacctctctttccccaagctccatttgcataaactgtctctgatgagatttagggcgcttacggtggtatggctgtagacaactgtctcaggaaacagacccatgacccacccagttgccaagtcagaaacaggatgtatactcttgacttgtctctctcccctacacagcaaaacaatcccaagacatgtcaattctatctcctgagcaacccataaaacgatttctcttctttccatcttccattaccctaattctggtgttcattctctctccctgggatggctgtaaaagcctctgatttctcccctttccaaaccagtctccacactgcaaccatagtgatctaaggcaaattctcaccttttcagtcttaggcttaaagttcaacatccctctggatacagtctaaatctttaacacggctgaaaaggcccagcaagagctggaccaagcccacctctccagcttcacctttcctcatttctcctttgcaccctctgcctctgaacaagttacagtcttccaaagttgtcatgtttcttgacctttgctgtctcctctgcccagaatgcaatttccctgtctggctaactcctgtccagcatttggcctcagcatggacatctgttcctctaggacgcttcccctgattcaccaagaccagcttaactgcccctactggctgttcctatagcaattctttaccacagactactgattttttgtgtttgttttgttttggcagtctgacataactttatactaatgcagcttctagccctgtcccccactccttcctgatcagtatcccaatgtccctcctatatggagccaccactaccccacaggatcctgtaccacccttctcccagaacttatcacactttttttttgtaattgtgtttccattctccaataaattgtgagtgccacaaagaaccatttctatctcacttaccacttggaagtgactggcaggtagtaattgctcaacaaatgttctatgagtgaatgaatccttgggataattatagtactaaccatcttatttagttatgacagttcaatagaaacacgtaaaataatgcttttatagtttacatactgctatagagctattgtattatattattattattctattcctaccctctattgcttgagagtaggatattgccttattcaattttggttattgtcccagaactcagggatatatgtctggcatatattgtttttaaccaatttttgttgactgtatcaatgattgtaagaagtgaacaaagggccagataattgaactatcctggaccacacacagctaccctgttccagaagcaggactataatcccatctggaaaaagggaaacttggaagttgacatctaaatgaaattccagcatggatgagagaagccctgatttctctccatcaagagactagccagctatggaagccaccagagccccagacctccatggtcaagtattcacatagtagacatgacccagacaagagggtgcgtatttcagcgtggaggggagactgggcccttggtttcctgtgtctttgtagtcagttctaacctcagcctcaggcactggtgttggggccctattcatcctcatctgcacgtccctcagttcttttcctgttgctattatcctatagagtcagcaagtcatggaagaggttttacagtctaaccctgtgggggtgtcaggagttgcctcctgccaggtcttcagcataaaaatcccccctcctcagctcccagtcaattcttcatccccacccctagactctcccaaatacccctgatgaaacccctgaggtggaaaaagataaagacaagcaaagataaacagcacaggaagcagaggtacaaatagaattctgatttttctcctttctctccacattttgaggaaatgaatccaatgtcctcaccccacctcctgcagcggagaagtcccctgagcatctctgaacatcatgaaccctcaaagtaagcttagcttgggccccttttccttttctatcagtgaggccaaagagccccagatgggagacaggtggatttttctctcagctgggaccttttctctttcttgtctagcacattttgggaaaccttcaagtacattctcatgctggtattatttaaactttgcactggagtgaattccaggagttatgtccacactgagaccaatggagatgaacctaaagcaatatgtggccaaacaccttagcctctttaaatatactttcctttgctccttggttaacagggtctgtctgctcgcattagagaaactgcccagtgactcagatcctgaaaggatctgctttagagaaaaaaggagtctggtacttctcactccatctagtgggcaacctgtccaactacactttttgctatcatccaatacagacaacactggcagtcaataaaaaagctcattctcccatttctaaaagaattcaatctaggagtctagctgctggcttaacaaagggatatacagcaaagcctaaggtgccctgactcacgagagagctgatttctgccgaaatgctgaggtgaaaccctaaaatggttctggccacctgctaggttctagctcagaccctgcactggatcatctttgttccacccccaaaccagagtaaatggaattcaggaggctggttctgtgcccgcccctatgtacctcaaatactcgtagctgccaagcttttaaacaatgaaacttaacactgtacttaaagggctgttctgctcaaatcataaatgtgcacgctagttgttcaccagtaattaaaactactcgtacacatttaatcaacattttcacaagcgttttgccttaactaaaaatttgtatcaacatgaagtcctagaattatactgcatgagcccccaggatttggagaacatcattcacccttcttaatccaaaaacttgggtgcctgaaggtggggttttgatcatggccaggcttcaaatttaggtcaggctctggtggtacatccttatatgcttggtgctcagcacaggtcaagacacacaatagaccctcaataaatatttgctgaatttgaacaattcctgtaaaaatctcattaagagacatcagcttgggacacagttcctctcttactgttccttctcccagaagctcctggaatgagcaggtctggcggcagggggcacacagggctgctgctcaaatcggagaatggcacaaactccaaaagggagctggatttagacctcccctccccatgtagataacgggattcctaaggtgcagagtgggagaatgggtagaggaagcaggtttcagagactgagaacctactaaactcctaagagaactttcccttgcaaagagaatgcatgaaaaaagaagggagaagaggagagaagcctcccacagctgttagcctggaacagccgctctcacctcagttcatctggggaaggggctacaaagcaaacaatctttattcacaattggggtggcagaggggagatacccccaggtcagtccaaaagcaaagatactgggagggaagatggcgctgggcgaggaactcagcactcatcctcacccagcagggcataagggtttcggccagccaggctggaccctggagccgaggttggggtctcctcatccccttctccctcctcatccgcatcccggtcctcctctccctcctcctcacaggagctgctcagctcttcctcttcctcctcctcctcgtcacctgctggccccaccctgccctgcaaaaccaccagctccgtggtctctggatgggactcccaggtgcctggggaaccaaaacaagaaaaaaatggaggagagttttgagcaagaactaaagccaaggaaagatggggaagaggcaaagactaggaataacaataatctttagagctgctggcattcattcattcatccattcattcaacttcctatgtgcagattgctgaacagaacctttgtgcacatcaacttcaatctttacaatcactatgctaagggtcaattattaccctcagtttgcagatcaggaaaatatcacagatgttaagtaacagagctagccaacaggtacagaatccaggtttgaccctctctctggccacaaagcccacacccttttacctacgctatagcagggggctggggaagaatatctgggctctgacctttctgttcactgtagcctgggggatgaaaacacaggctgaggcggccgtccactgccagccgcaagagactgttggctgctctgtacacatcattccgagccgccttggctgtcttgtaaccacgtttctctgcccaggctggaggaagaaaagaataatggaaagggaaagcattaaccaggtaccagttatactcccactcccataacacagtccttccagttttccccaaaacattccaggccagagatcttactggctatgcaacaaaaatctaggggtgagtggacagcagcttcatcaatggcagaatctctgaggagaggaaaggagacagggaagggtaaaaggcgaggcaggtaaggaagagcagctgaaaccaggtggggcgaagccaggcacatggaactcaccttcacagatgtcccaggcacaccaggggtgttccgctgaggggtcctcagcctctgggtggcgcaggtggagcagggcctgcacgggaattcgggaggccaggtagcccacagcagtgtagggctcctggatctgggcgatagggtagatccctgccagaacctgagggaaatgagcactcagtactttcctcaatgtcccaccttctctctttcccttacccaccctccccgtcatacctgcaactgcctaggcagaagagatgggaagatgaggcctgggcagtcacagagcttcacagagggggtaagaaagtaggtctgaaagtatcgggtatggcccggggttctggagacactcacgactttccgccccaccagcccattgatcagcgaggactttcccacattagggaaacctgaggaaggcaaggaaaattaacgtttaacaggtttctactctgtgatgggacttggtgctatacctataggtaaaaggggaactaaggctcagaaattaaggaaatggtattgcagaatacaaatcacgctctgggctgccagggttaaatcctggcccttccacttaccagctttgtgatgtcagggcaactaactttctgagcctctgtttcttcattttacagtgtggacacctccctacctcagggtggtcaggattaaatgagataaccaatacaacttgtgtgggtcagtgcctgcagtacagtaagtacccagtaccagtgatccacatctcataattactatgacttggcctggcacagtggctcacgcttgtaatcccagcgtgattactttgggaggccaaggcgggtggatcacctgaggtcaggacttcaagaccagcctggccaacatggtgaaaccccatctctactaaaaatacaaaaattagctgggcgtggtggtgggcgcctgtaattgcagctacttgggaggctgaggcaggagaaccacttgaacccaggaggcggaggttgcagtgagctgagattgcaccattgcactccagcctgggcaataagagggaaactccatctcaaaaaataataataataattacgatgacttgtccaaggagaaaactggaagccttggggctcactgccactctgctcactcaccaccaccagtttttgtgtttctggctgacttcagtgccttcatctcccttccacagagcatctcctttaccccacctcagctgcccactcccatggtaatacctgcatcttgtcacttcacagctccaaagcctcaattccaagcacccctctctgccctgacaactcatctttccagctcacttactctggttactccatgccagtaagtctttgacccctgaccttaacacagtaacactatgcaatacccaactcgtgtcctcaatttccttcttacttgactcagatttcatgatccagctcctcagccagggccgttcacagacctggaactccctggtcccacttctcccctctatcttactcacctggcaaaatcccaaccctgtaaaatccagctctgcccattcagcactgcccctgggcagctgactgtggctaagaaaagatgtaccactgtgctcactctttacaacacatgcaagtatctaggaggaagggagggaaggagggagaaaaaagttctcctttgacgaccaccaccagacctagttctctgtccgctttgcaggaaaactccttaaaagacttacctacttttttcaccatttcttcctgctatcttctttgtaactgtaaactacaacatacaaaaaaatgcacagaacatacatgtgcagcctgatgaaccccataccacccaatgtgtgacaacatgttccatctgtccttgtttttttttgtttttgtttttgagacagagtctcactccctcacccgggctggagtgcagtggtgcgatgttggctcactacaacctcatcctcccaggttcaagcgattctcgtgcctcaacctcctgagtagctgagaccacaggcgtgcggctccacacctggctaactttttgtatttttagtagagatagggttttgccatgttggccaggctggtctcaaactcctgacctcaagtaatgcgcctgcctcagcctcccaaagtgctaggattacagggatgagccaccataccggccgccactcatccttcttgatcataatcctctccctctatacatgcaagctttatccttttaaggaaatcaactccttacatttctctttagtttatgacctgtgtatctctcaacaatgcagcttaattttgcagctttcaaacttgatagaactgaaattgtgcagtatggatgctattgggtcagactcttttcacacaatgttatgtgaagttgttgcaccttctctcatgggcctactccagtttggctttctccaccccactgaaaccacggatcttcacattgccaagcctgctgagcagctctctgttctctcatttggcctgtcagcaacagttgacacagctgattcctcctttcctcttcaaacaccttcttcatttgacttctgggacgctcccttggttttcctccttctcactgtcctttgcccaactaaatgctggcttgtcctaaggctcagtccttgacctcctcttctccaactatttcctttctctcctacatctcatccaattccatggcttttttttttttttttttgacgaagtcttgctctgtcacccaggctggagtgcagtggtatgatcttggctcaccgtaacctccgcctccaggattcaagcaattctcctgcctcaccctcctgagtatctgggactacaggcacgcaccaccacacacggctaattttctgtattttttggtagagacagggtttcaccatgttggccaggctggtctcaaactcctggcctcaagtgatccacctgcctcagcctcccaaagggctgggattataggcatgagccactgtgcccagcctaatcctgtggctttaaataccacttatatccatcaatggttccccaaatttaaatctttcccaaattcaaatttccgtcctcttctctcccctaagctgctgactacttacccactgcctattcaacatctccactagggatatttaaaaagaatctgaaatttcatttctgattcccctctcctccccaaagccttcaaatctgcttctcccccagtcttcccatctcagtatttccagttgctcaagacaaaaacctggaagtccttctttatcctcactttccttcacgtgccaactgcaagccatcagcgatctcattttctctaccttcaaaatatatcatgcttccggccctgtctcaccacctccagctccagcatcctactctaagcaactcttatttctctcctagattactgaaatagcctcaactgctctctctgctccctttcttgcccaccccccatcatttattctctactcaggaggtaaacttataagaaacaaaatcagatcctatcattcccctgttcaaaacctacccttggcttctcatgagacttggaataaaatccaaaatggctgtcacagcctcagggctctacatgatgtgggccctggtgatcttgctgacctcatccccagtactttatcctggctcccatactccaatcccctgggcactcttgctggtcctagaatctccaagcccattccctcctcaagaccctttccccacagttctgaatggctcacttcatctcatcatccagttctctcctcagggaggttttccctgagcacctctcctctcagtcactctctatcccctttcattgctttattgccttcactgcccctacatgatttcggatcacaaaatctatttactcacaagaaaataagctccatgaatctacagacctttttgccatttccacagcagtatgtcccatccctagaatatctggcacctggttaagtgttcagtacatatttgttgaatgggtaaatgaatgagagctggagggaaatccaaactcaggggtgcctgtgccacagcaaacactctccctctcacaccacctggaatagagatcagctagagcagaggctgctaagagagggaacagaggctccttgtgacagggagactaggatcagaagtcagggaagggacagccgggtgaaatgactggaaagaggagcaatcactcagcagtaaggcaggttcttccaaagacaaaaaggacacagagataagtcagggcacttccaaggaacccaactacctactccacactcccaaatttattctgggttgggccctttttggttccaatatcacctcggataccataacttgtccaaggtctcttcttacctctcccaccctaaatgaagacgggccctgggtcctaatcatacattcctttttcctccactgtgagctgagacaaagcccttaagaggagattctccttggcaacaaacttaaagggttaaaacctagaagaatactaattcttgctgagctcctactatgatttgataatcactgtactacagactaattactacaattcaaatggtttatataaaccacttaaaacagtgcctgttacatagtaagcaccatataaatactgagttttaacaataataattgttattattgttatcactatttgtcaggcattcttacactctcttaacactattcccatcattcctcacatccattctttttttttaaagacagggtctctatcagccaggctggagtgcagtggcacaatcatagctcactgcagccttgaactcttgggctcaagtgatcctcctgcctcagcctctgaagtagcagagactacaggcacataccaccacacttggctagttttctttatcttttgtaaagatggggtttcactatgttgcccacactagtcttgagctcctggtctcaagcaatcctcccacctcagcctcccaaagcgctgggactatataggcatgagccctcacacatggccgtcatccattcttttactcaggtatcaatgtccttatttttaaaatcaaagtaactaagactcagagtagcaaaatcacttactcaagacctcacagctgagaagaggtggaatttaactcaggctgtcatgatccttccactgcagcagacgcctcttctgccttgcccaccgccactggcagagatcacccctcagacaccctggggcctaatgagacctgatcgccctctctcttctccgaatatgaaaactctgtacctccttggaggccaccacgcacaagctgccacttccttacccacacagccgatggtcaccaccccatccttgtagcgctcttgggttgggccagttggctccattgctgaatcagtctgctgctccaccaggactgctgggccatcctcctcttcctcctcctccccagagccattaccccaggtggccccagccacatcccgagcaatcttctcccgccagctgctcaagtccactgctcaaagaaggagaagattaaagaggttctccccagggctgctgtgcatgatggcacatactgtgccctgcacagattatgtaactggcaccctctggagttgtacagtgccaacctaaataagagcaggtcagagaatctcccaaaagtcatttgaccctaccctccctggaatcacgcacgtttctctgagcttctgaaaagtactgggaaggctaaaggcagcaagccactgaggctcctgactacctgctgcctctcgtcccaccaagtcagtctgctccttattctgtcccttcccctggcctcttgcacatatccaccatagaggggttggcttcaggaaaggtgagcaaaatgattctgcatctttggtctcccccatgtcctcctacagccctcctctaagggccacatacctttccccacagtgatggcttcacaggctctcagcaactgctctggccccagggcccgagtccatcctctcccccgcctccgactcttcttcaagactgagatcagagggcacaaaaggatgggcacacgggcttaggcctctcatctctcccaccacccttaggcccaagaccaggtgcccccttgtcaataagcctctctgttctcccctttgtcccctgccaactcacctctcccaagttgccctctctcattgcccactcaccactactaggatcctgtggggtgcgggggtcccgaggaaaagaggtgaaaaggacgacgtggagctggggatagtgttgatggaaataatgcttccaggcaaccacaagagctggcggggccagatccaccttgttcaaaaccagcaccagggccagtccaagttctccagtcacatactcataaagtgctggcgggaaattcacaacctaggacagagttgataagaggatggagcagtgaaagtcaacccagagttctctgcctccagctccccactcagcaggtgtagctcagagacaaggccctggtggtagcagactctgggctaaaaactataaaccagacaaactgaaaaacaaagacaaaacaggggttagtaatacttctgagtctcagagggcttcctataggtcatgattagagatggaaatgaacccaaaacaagacaaggaaacagcatcacttagcacactgaggtaaaggctgggatcggaaacagggatgggggttagggtagaaattagtctgcttttttgtgtgtgcacaactatgtaagtgtgtacacgtgcatatatgcatgcatgcaagtacgtgcacatgtgtgcatgtttgtgtgttaatgtgactgtgaacatgtgtgcaaacatgcctgtgtatattgatgtgcacatgatgtacgtgtgagtatgtgtgtgtacatattattaaggacctccaacctaaatggtcctcacagacctccctttctcccactggaggacaagagtgaagttgcagagctaggattcacacagggcagtccagcagcagtctacagccttaactactactctagcattccaggtgggttctgtagcaactgatgtggcagtgctagagaaatgagataaggaagaaagggcatctttgggctgggcaggaggaagtccccagctgcattcatagaatccctggagctccaacacttggattttctattggtctgtgatgagctaaaggacaggacatggctgttttgaagagaagagtgagctggccaagggaggaatgacaggctataagagaataaaaaactgagttcctaactgcggacatcagcactaggtagagattagaaagacaggaagatagatacctctctgtctcccaactcttgcctctgacctttgcccctgaaaaacctttctccctcctccttgcccacccttatccctagtactcactggatgtcggatatcagtgataagcaggacgatgtcagacatctctaacacccgccacagctgcctccatgtctaaaaagacaggatcaggaagagaaactgaaaacagagtccctctccagcctgatcccaaaccaatttgaccataggtcactatgccccactcctgtccctagagtacactgtcacctccagattgtgctcaaagtagctgagtttctcagaggagtaagccccatgaatcttcccaagatagtcttggaagctccgttcctcttggctcattagttgctccttggacatctcatagctccaaggaggacgtcgaggaaagtccagaactgggaattcaggaaaaagtccaagtgtgaggaaatcttcaggattcaagagtacatcccagacccctccttcctcacagtcggcttttacctttccaaactccttccccagcccaatgcctgtcttgctctcactcacctgagccaggctgatacacctcccggatgtccagctccaacaactcagcactgaccggctgtagaacttgctcccgggctgctctctttctcctctctacctcctccctgctgtctctctcaaaatgcagtcggtatctaagggaacagggaccgagacatccagagcaatcctgtggccacaaactcctattttctcccctcttgtacaatcaacttcgcaaaccattctctccagagtcgttcaagtctcctctctcaagtcagacttcccccaagtccttctttcaggcaatactcagccttctccttctaaaagcccaactctctccagcccctctggaaaggaagactgtggcccgctgtggggagccgagtggctagcggagaactgtggcatcccaggcccaccgtcttcaccagtagcagcccgctttcccccaaagctctgacttccgggtaggcgggaaagccgggaccagcgccccctcccaccctcaccgatttgggtcgtagcctcgtggacccagcccctgagaaggctgctggttaagcctgcggatatgatgggtcacagactccccgtccgaggtgtcggtctgttcctctcgccgctcccggctcccgctgcggctgttggaactggagcgcagcccatcttgaagccctgcggggaggggccggtgacgccagtgctggccagctctcaggggccataagaccctctcccccatcggcctgactccctttcatcccactcaacttcttccgatgttcagtcctcccagacaccctatttgggaccctcccggatgtgcgtggggggagtcactccttcagggagcagtggggacggcgccccgtgctagctggagggattcccctcccccaactctccatccttccccaccccttccagatgtagggggggtgggggatcccctccgcgataggccgcgagggttgacgcggtcccacgaccccctcccacgatccccagaggtgcagcgggcacacccctccttccagatgtgcggaagcccgagccccgccccctcctcccgctcccgcactgacctctcttccgctcccgtttgtcctgcaactgcttcttcttctgcttcacgctgaatggcttcttcctcggcatggcccggaccagtcacctggcccgccctccgccgagctcccgccgcctcaactgactgccccccggggcagcccccgccgcaggggcccgggaccctagaggaggcggggctagcaggtgacgtcagcgggcgggcccgacagaattaccgccgcggcggcgatggaaggcggacgggggagatatagtcacttccctccaggagcgaggcgagaggatgatgcggggtgggctactggcacgtgagagccagtggcaccgagagggcgccccggcggcgaggaaggaggcgcgcgtgggaggaccaggctaactccgtcacggacgctaccaactcgcgttcggaggagggggggcgcgtgtcatcactaccttgcgctcccgggagaacctaccactcacctggagggggcggcggagcggagggcggggcctactacctaggggagagggggcgtggacacgctgaggctatactacaaagccccgggcttgaccttagtggaaagccgagactgcgtccaggttgctggactacaccgggggcacggtcagaggtctttaggggagggcggcggtctgagagtcctgggtgccgacctgttgggacccaaattccttgtgggaacgatgataaggagcaggtttacagatcataagtgcaaaagcgggcgagaagggaaacccaagcgggacaaggacttttggggggaggtcaaagggcacgaagttgtgcctgcagctgttaccatagtaaccgaggaccggatgtggcgatcttacggtgcgacagtcctcttctcaggccctctggcccgagagcctgttgactctgtgacacactctgaggagctggttgtggtgttttccagcgagggaagaaaagagtaattttttcaaagcatttatagaaacgcagcaaagggaaggtgtgaggttgccgccatgcctggcagagacggagggaggcagttggctccggaatgcggccgccgcagatgttctccgcaaccttccggaagtggaatggcgggagcctcagcattgctgcccaccgaccccccggaagcggaaacagaatccccgcgtgccccttcctcactaccctccaaatcccgctgcagccattgccgcagacacgatgccgaaacgaaagaagcagaatcatcaccagccaccgacacagcagcagcccccgctgcccgagcgggaagagactggagatgaggaggatgggagtcccatcggtgaggggtctgggagggatgtgcacatgcctgtcaagcccgtccgggcaaggggctaggggctaataaggtgcgaaggagggggctgtaacggaaggaggaagggcgcacgcgctggggagggatggaagtggggctctcccaaatggagccttgaaccaggagttctcttactggaaccatcaacctcaatacggccccagacctttctggagaaggcgggggtggagagaataaagagctcttttgcgcagccgcagaacagtaggggaaaggggtagtagagatgttgcagattgcgatgactgggatgacagtttgtatccagactttgactgaaaaggtacaggtgcagctttctctaaactagtcctctggccagcagttaaggtgagggattggttcatgtctggagacacttaggttgttttggatagcgacggtacggtgaagaaaaaaagttgtcagtatcttttcctgcattatcccctttgattgaatatctactttttgcaaaccctgaaacagctttgcagaaaaaagggcagatagatggggtgagaactcccaagactgctgaaaatatacctgactttactggttgaattaagaaataagtaatacaagaaaaacacctaagaacagaatcatcagtcctttaatccattctgatgaccatattttcatgtctgctcttaggaccacccagccttctgggccctccccccatggccaatggaaaacctggcgaccctaagtcaggtgaggaggaaggggccctgatccttgtattaggtcgtagagaagacagcaagggaggggataaaacccaggaaggacttaaaaataaaagatcagggattccatccctaaatgaatggagagaagttgtatatttgctgatttaaaaactcaatgttgtaaaaatgtcacttcttcccaaattgataaacagatttcatgcattccaagtcagaacacccataatgtttttgtggaaatacacattattatagggaaatgcaaaatatcaaggcgactatcaagacaatcttgaagtgggagggcttactatgaatatcaagatttgtaagctgggcatggtggcacacgcctgtagtcccagttactcaggaggctgaggtgcgaggatcctttgagcccaggagtttttgaggccactctgggcaacatagtgagatcctgtctctaaatacaagaagaaaaaaagacttactataaagctacaatagttacaacgatgcagtttggaaacaatgatagacataagtcaataggacttatgtcccgaagagtccaataacaggcccatacatgtgtggacacttcatttatgatgaagatggaactgaaaagttggtcttttcaataaatgatattggatcaattggatattcatgtgaaaaaaatggaatttcaccttgcactcataatcatatacaaagatctatttcaaatggactgtagatctaagtataaaaggtaagagaataattattctagaaagtaaatgtattttctaagagtagctaagagttcttaaacagacaagaaatgcacgtatacacactaaccataaaggaaagattgataaatggaactccgttagaaaatataaatttgcggctgggtacagtggctcacgcctgtaatcccagcactttgggaggccgaggcgggcgaatcacgaggtcagcagttcaagaccagcctgaccaacatggtgaaacccctgtctctactaaaaatacaaaaattagccgggcatggtggtgtgtgcctgtaatcccagctactgaggaggctgagacaggagaatcgcttgaacctggaaggcggaggttgcagtgagctgagattgcaccactgcactccagcctgggggacagagtgagactgtctcaaaaaaaagaaaaaacaaaatacaaacttgccaaataataccattaagaaattaacaggaagccatacaatagaagatatttgcaataaatataacaaataaagatcctgtatctataatatataaagaactcttccagacaagccatttgaaaaattgacaaaaacacaggacaccttattaaaatggagatctaaatgaactaaaggtctaaatgaacaagtactcaatatcattaattgtcaagtaaatgcaagataaaaatataccactttgaaattagaactcttgtgtactgctgctgggattataaaatggtgaaactactatagaaaacaatatgaagaggttcctcttaattaaaaatagaactaccagatgacaaaaaaattaaaaatagaattaccccagaactcctgcttccaggtatatatcaaaaaaaaaaaaatggaaagcagggtcttgagatatttgcagactcatgttcatagcagcagtattcacaataacaaagaggtggaagcaacccacatgtccactgatggaaggataaatgtggcgtgtacatacaatggaatattattcagccttatgaaggaagaaagtgctgtcacatactacaacatggatgaactttgaggactttatgttaagtaaagacatagtgtattattccacttatctgaggtgtctaaagtcaaattcaggggctgggcatggtgcttcacgcctgtaatcccagcactttgggaggccaaggcaggcagatcacttgaggtcaggagttcgagaacagcctggccaatatggcaaaaccctgtctctactaaaaatagaaaaattagctgggcatggtggtgcacacctgtaatcccagctactcgggtagctgaggcatgagaattgcttgaacctgggaggcagaggttgcagtgagtcgagatcacgccactgcactccagcctggatgacagagcaagattgtcaaaacaaaaaataaaaataaagtcaacttcaaagaaacagtagaatgatggttaccagaggctgggggaaggaagctggaggaaggggagttttgtttaatgggtacagagtttcagttttgcaagataaaaaacttttggaggtcgggcatggtggctcgtgcctgtaatcccagcactttgggaggccaagtcgggcggatcatgagatcaggaattcaagaccagcctggccgatatggtaaaactccatctctactaaaaatacaaaaattagccaggcgtggtggtgggcgcctgtaatcccagctacttgggaggctgaggcaggagaatcacttgaacccaggaggcagaggttgcagtgagccaagatcgcgccactgcactccagcctgggcgacagagcgagactccatctcaaaaaacaaacaaaaacttggagatctgtttcacatcaatatgaatatatgtaacactactgaactgtacacttaaaaatagttaagatggtaaattttatgtgttttttaccacaataaaaaccaaacaaaacaaggcatgatgattcatgcctgtaatcccagcactttaggagaccaaggtgggaggatcacttgagcccaagagttcaagaccagcctgggcagtgtggcaagacccaatctctcattaaataaataataataaccaaacaaaaaaataaccaccacttttcacactcaccatggcaaaatttaaaaacctaacaattccaagtgttgtcaaggctataggacaactgctggtgagagtgcaaattggtataaccactgtgaaaaaaaagtttggcattatgtatgaaacttgagcataacatatactttataagccagtaatacctctactacgtatatattcaacagaaatgcatacgtatgtgtaacaacatgtataaaaatgtttatagtggcatttctcgttatagccccaaactggataccacccacatgtccatcatcagtagaatggataaataaattgttgtgtatgcatgcaatgggactacactgcaacgaaaatgaatgaactgctgctacaggcaacctggatgaatctcacaaacatgatgttgagcgaaaggagccagacataaaagaatgcagactgtatgattccatttttgtgaagttcaaaaacaggcaaaaactaacctatggtgtcaggatagtggttacctttggggaggagggtgggtaatgggaaaaggggcacaaggggaggatcttttgaggtgctaataaggctttatctcttcacctggtggtggaaactcaagtgtgtctactttgtgagaactgggttgtgcacttaaaactggtgtgtctttatgtatgctgttcttcaataaaaaaaatttttttaatcacggtttatcaggattcagctgcccattagacacctttctgtgtctctctctctctctctctccagctcttcacagaggtcctccaggatcaaggggaccactgattccaccactgctgagtctcccacctcctccttggggtagaggcccaattcggagagggcttggccccaggtctagcccatatggtcgtggttggtggggagtcaatgcagaacctccttttccggggccaggccatgggggtcccaccaggggaagctttcacaaggaacagagaaaccctcgaaggctcaaaagctggtctcttatcaagaatacctgcccgcccaaggatgacccccaggttatggaaggtgaggtccattttgttatgcccattactcccagagtgacctaattttcagaagatcattcacaatcttctctgggctttcctttttgcttttgaagcagaagtagacctcaatgttatttctcccaggagaaagactaccattccaaaatacctggaaatggtagggggtagaaaatcagttctccttctgtctctgcgtttcattgtatttgttttctttgttgctcaaatttttaactgttccattttcacttgttcacagacaaatccgaccgccctgtctgccgacattttgccaaaaagggccactgtcgatatgaggacctctgtgccttctaccacccaggcgtcaatggacctcctctgtgagactgtgccttcccatccaggctggaaggagctctctgtgacctagcggccatttatttctctgtagccctatgatggctactgtgaggctcttctaacaccctcagtcagtgacacacccatcccatccaccacttcccccgtgtggggtccagagtggtgttgcatcactggtgcgcggcatacgcgctttcttctgatccagcctgtagagactcgcctttgggacccatctttgcttcctttcagttgcctcctggatcttctttcccgtcatcaaatgactgctgaacaggaaacctctttggtgctgtttcttgtgcatctgtccacctgttccccagtattgccctcaattcctgagagccctggagcggtttcctaccattcccttcttttagctgcttgttttaagtcctttttatgtgacattccctacccccaatgttgtcagctgcttgtgaaactcagccaggttgtctaacctggggtcaagtttgggtgactggtgcagagttacttcctaaaaggccactctccctgcctttggatttcatagtttctctgtcagtagcatgatccccaccgctatggtctatctatgatcaccgtgctttgtgaaactgtgcatccccttgtagcctttctcagtgtccgtggcatttttgtgacttcccagcactagaataagttttcctgccaaaatgagtgaggcgcttggtgccctctggactttcccacttcccaacatgggagaattgtgaactttccatcagactgcctccctggccctccccattcttctcctgttggttattctgagtctgacacagacccatgacatgtcttataaagcctccaatggctttatcctacctagatcccttccagcccattttaattagactatgtcattgtgaggccaccagtccattcatttgaattctgtgaatctccaccttgcctatctttgggtagaagctggacagtactgttgccctcttccaatcctcttcccctacatccctggcactggttgttttctgtgaaaacagcagtgaacaggttcagttttgaactggccctgaggaaatgggtcaggagttgtattggcaagagggaggggtgagagctgttggagaactgagaatgaggttttttttttttttttctttttaactttttttatattagtaataaatgcagtggaaaccagcattttatttaatccctgtgttctagtcatctctggagttgcagatgaagctgttctcacctggtggagtcagcttattctttagttcatacacactagtgatggggaatgacaaagcttaaggttcttccaggctgaaaaaaaccaatggaggttccattagcctgtaggcatcaaccagaacaagctgccttatgttcaagggcaaagttttgtaagaaaaaggaaaggccaggtgtccgtggagttatttttaaatattttactttgcagagtttgtgtttatggagtggtaatgatgaaggagtctttcagcagcaatttgcagaatgcctgtgggccaggcaatataccaagcactagagataactgacagccaaagccaatggatttaaaatgtacagggaagacaggtttctcataatcacaaatagcatgtaaagttaaacctgtcaaaagtgctgggaagaagacagggaagaaaagagggtgaaagagagttgtgtaataaagggagtcagggtaggagatgcaactgagacaagctccaaaggataaacaggaggtggggtgggagagggaagtcaaggcaaaggtcttcgctaaaagacctaggggaagaggagctaagaaacctagggacagtgggagatgatgcagaagaaagaggagttagaccactcagggccttggaaaacatgaagatttggctcttttcttagaacagaagcctttgaagaattttagacaggagtatcatggcttaggctggcttttcaaaaaaaatcagcttgtatggagagggcccaccttggacctggaagttaattagaaggctactggctacttcagtagtacaagtgagccatgatggtgacatagacttgggtagtagagttggagaaaagtagacatttgaaaattacaggtcaaaataaaagtatcagatttctccaggtagttctggcttatgtaactgccatttaaaaagaagtcttaagatagaagtttatggctgggcgcggtggctcacgcctgtaatcccagcactttgggaggccaaggtgggtggatcacgaggtcaggagatcaagaccatcctggctaacatggtgaaaccccatctctactaaaaatagaaaaaaaattagccaggcgtggtggccggcgtctgtagtcccagctactcgggaggctgacgcaggagaatggcgtgaacccaggaggcggagcttgcagtgagccgagatcgcaccactgcactccagcatgggcgacagcgcaagactccatctcaaaaataaataaataaaaaataaaaataaaaataaataatttttaaaaagatagaagtttatttctctcacaggtcaagaggtggacaatcaacaatccaagatgtgtgacaatgccaccactacaaggtccctgagtattcagaacctcaacccccaactttcagattcacaaccacaagcttctattcactgtccaaagtgaagctctggcttcctcatccatgttcaaagcctcaggatggaggaagggctgagaacaccagttgtctgggaagaaacttctttttttttttttttttttttttgagacggagtctcagctctgtcgcccaggctggagtgcagtggcatgatcttggctcactgcaagctccgcctcccaggttcacgccattctcctgcctcagcctcccgagtagctgggactacaggcgcccaccaccatgcccagctaattttttgtgtttttagtagagatggggtttcaccgtgttagccaggatggtctcgatctcctgacctggtgatctgcttgcctcggcctcccaaagtgctgggattacaggtgtgagccaccacgcccagccggaagaaacttcttaaaagttaacttataactcctcaacttatgggcaagcatttaagttgagtttattaattctacagaggttatctccctaaaagggggctaggaatgacaggattagggtttgtgtttggtgatttcaaaagaaacaggaaattgttctggcttagatgctgtcagaaagatgactacttcttaatcttatctagaaggagggagaaatgaaatatggctaaagctgtaaggtaaaaaagccaacacattttagctgacagggaactgtgtggtgtttttgtgcttagacaagattttgaagtttgtctaatttcatcacaaacacaggatgaccttgtttgacactgattttctgtgagatagtttatgttcaacaagagtaccatggcctaactatgggcaacaggccagctcccagcaacaccaaagcctgccagttattgtcaggccagttcccaattctcagggactgtttttcttaaaagtatgcaaacatataattacaggttgagatgaatcatatgaaggaaataaatggggtactgaatagaaacagtagttggggagctactcaagacatggtggccgggcgcggtaggtcacgcctgtaatcccagtactctgggaggctgaggcgggtggatcgcctgaggtcaggaattcgagaccagcctggccaacatggtgaaaccctgtctctactaaaataacaacaactagcgaggcgtggtggtgggcatttataaataatcccagctacttgggaggctgaggcaggagaatggcttgaacccaggaagcagaggttgcagttagccgagattgcaccattgtactccaccctgggcaacagagcgagactccatatccaaaaaaaaaaaagacatggtggctaggatagacctctctgaggaatctgtagatgaagggcccagaacttagccttgaggaactctgacattgaattgctaagtgaagaaggacaaggataagccagacaaggagactaaggagggatgacggagaggcagggagagatctcagagtgtggcgtcacctggctgcttgctcagtgccaggtaccctgctaagctctttatagacattgtctttgtcttatttaagcttcacatacttttttggggggggagagggggtggttcaagcgattctcctgcctcagcctcccgagtagctggaattacaggtgcccaccaccacacccggctaattttttgtattttagtagagatggggtttcaccatgttggccaggccggtctcgaactcctgacctcaggtgatctacctgcctcggcctcccaaagtgctgggattataggcatgagccaccgcacctggccaagctttgcatactttcagtgaacactttagtgcctactgtagggcaagcactgttttaggagctggagctacatcaataaaaaggacaaaatccctgcccatatggagcttacattgctttgaggatgatagacaatatacataggtaatataattttaagtaatagtaaatgcttcaaatgaaaataaagtgaaaaaagaggttagagagtgacaggtggaagagaacaggttgatacaaagagagagctgctttgaggaggtaacacatagagagaaaattaaacgagggaacaaaccatatgaacacacagagaaagtgcgttccaggcacagggaacagcaaaggcaaaggccttgatgcaggaatgactctggggtgtttgaagtaaaaatagaaggccaggccaggcgtggtggttcatgcctgcagtcccagcactctcagaggctgaggcaggagcactgcttgagctcagaagtttgagaccagcctgggcaacatggtgagaccctgtgtctgcaaaaatgtttaaaaagtacccaggcctggtggcgtgtgcctgtagtcctagctagttggaggctgaggtgggaggatcctttgaggttgcagtgagctatgattataccactacactccagcttgaatgacagaccaagatcctggttcaaaaaaaaaaaaaaaagcccagtgtggctagactgtgggagatgggatcaagatgtttaacagagggcatattgtacagagccctataaactatggtaaagcatttggattttattctggattttatacttttttaaatatttttatactttgaacaaatggatttactttttttttttttctttttgagacggagtcttgctccatcacccaggttggagtgcagtggcatgatctcagctcactgcaacctccacctcccgggttcaagtgattctcctgcctcagcctcccaagtagctgggactacaggcgcccaccaccacgcctggctaatttttgtatttttagtagacacagggtttcgccatgttggccagcctggtcttgaactcctgaccttttgatccgcccgcctcagcctcccaaagtgctgggattacaggcgtgagccaccgcgattggcccatggatttacattttaaaaccacctctgactgtaggtgtgaaggatagactagagaatgagaatgacagcaggcagaccagttaggaggccagcgcagtgcagtggtccagggagaagagacgatggcttggtcagggtagaggtggagagaagtggttaaatttgggttatgttttcgtctcagttgatggcaattacatctttctagttaactcaggccagaaatattggagtcatccttaattctatttgtcaaacatgacctccaatccattaacaaaacttgttggctcttttccaaaatacattcagaaaccagcccttttcacacctccactgctgtcaccctagtctgagtcaccatcacctcctaatagatctccctgcttctgtcatttctgcccattctttgctgcctgccccctcccacctcccgcccaggttgttctcagcacagcctccagagtcatcctttttatttaacaatttaaaaaatgttataggccaggcatggtggctcacgcctctaatcccagcactttgggaggccgaggcaggcggatcacgaggtcaggagtccgagaccagcctgaccaacatggtgaaaccccgtctctactaaaaatacaaaaatgagccaggcatggtgacgcacgcttgtaatcccagctactcaggagactgaggcaggagaattgcttgaacccaggaggcagaggttgcagggagccgagatcacgctactgcactccagcctgggcaacagagcaagactctgtctcaaaaaaataaaataaaataaaaattaaaaaattgtattatatacggagacaaggggtctcgctatgttgcctgggttggtcacaaacccctgggctcaggcaattctcctgcctcagcctcccaaagtactggcattacaggtgtgagccactgcacctggccaggtcatccttttatttattttattttatttttttttttttgagacggagtctcgctctgtcgcccaacctggagtgcagtggcgggatctcggctcactgcaagctctgcctcctgggttcatgccattctcctacctcagcctccccagtagctgggactacaggcgcccgccacctcgcccagctaacttttttgtatttttagtagagatggggtttcaccatgttagccaggatggtctcaatctcctgacctcgtgatccacccatctaggacttccaaagtgctggcattacaggcatgagccaccgcgccccagcccaggtcatccttttaaaatgtaggttggatcacatcactctgctcagaactctgcagtgacttccatttaaatcaacagaagaagccaaaatccttaagataatttaaaagacctttcccaatccagaccctgctttacttctcttttcacctttcccacaactctggctcactcgtgccactccagcccctcttgcctccttcctgtttgttccccatgtatgtccgaacactcctgtcacagggctttactccagctgtttcttatgctagaaaggcccttctcctggaaatccatgtggccaaaactaatcttctttaatgatttgcttgaatttcactttactgaggcctcatttaagactaaaatctgtcctcttgatacttttaaacttgatccatattttcttttatctataggatcatctcccctgctggaaacctaatcagagatctttattttattcagtagtatcccaagagcgtagaagagtgcctggcacatactatacactcaataaatatatttgttgaacagatgaatgaaaaaatgaggcagacttagctggctgatggattgattaggggaggaggaatggagaaagaggatgatgacctttcagttttggcccaaataactgaatgacctgtggtgcaatttcttgatggggaagcctggaagagacaggctttaggagtaagaacaagagctccattttgtacgtatgagagagatttattaaagatctcagagaagatgtcccataagcagttgaattcatgagcctggagctcggggcagaagttgggggccagcaagagaagtttgggaatcttcattggttatagatggtatttaaagtcaggaggtgataggtgataagtctagattaaggagagtgtcaaagatttagccctgaggcacttcaacatttagacttcaggagaagcccattagatgcaaaggaaacctatagagagtagtgtccctgaagaaaacaaaggagggagggagcgaccaagtctatcaaacattgatgggagagtgagtaggatggccccagatctgttgactttggcaagtgtgaattcagacaatggtggcaacaaaagcatgattgtagtggtttgagagctgacagaactacaggagcaccttgctcaagctcccatattaagtggtagagttagaagtgaaccaaagtcttgattgtggtgatagtttactgggtttatgcaggtcaaaacttatttaagtgatactttgcagtttattttgggtgccattttattttgtgtacagtttattgtatgtcaattatatctcagtaaagctgttaccaaaaaaaataaatgaaccgaagctccactgcaccgtgacttctgcatgttgggctccagttccctgtttacaattgtacacttcgggattttgtgacacatttcaacactggaccgatcagacctctcccttagccattggtctgcactgtcttttctgcccatgacccagtcagtctcgcgccccatgaccctctcctaaaacacgcgcagtctcctctctcttccccttcctctcgtgtcttccttgcctaccagcctcacctgatgggctcgtgttctctccgtccccgatccactcgggctccggcagctgctgcttgggcgccttcggcatcgcggtggcagaactagaaacgagttacagatagaaactagaatatgctttttaaaaaaacaaaaaacaaaacaaacaaaaaaacagtatgcctcaactccttcatactagtaggaaattattatgttcattccttgagtctcgcggcgtcgggaggtcacggcgtcaggcttcccagacagtcgtaaacgccatgtgtttacgcgactggagcaagcggacgccggccccgctccgtcattgcaggccacgcctccactgaaccagggccacgcccccgagatggcggcgaagctcgcacgtgcgcagcccgggggcggggttggccgcgccagcttggagagccagccccatcggggttccccgccgccggaagcggaaatagcaccgggcgccgccacagtagctgtaactgccaccgcgatgccgaaggcgcccaagcagcagccgccggagcccgagtggatcggggacggagagagcacgagcccatcaggtgaggctggtaggcaaggaagaaacgagcagagggggaagagagaggagactgcgcgtgttttaagagagggtcatggggcacgagactgaccgggcccgtgcgggagttactgcgcatgcgtgccgtgggcccgggaggagtttgccggggaggagtgggtttggaatcggggttaaaggaaagagatccagatgtcgcacgtgacctaagtgagactgggcgagataaaagaaagagcatatggcaccgagggagagatggggagaaatgggaaaaccttgcttaaaaaatttggacatccgccccaccatacactgtattccaccaggaatatatgagccctgcctcgacctccccttccccctgcgcgcgcatacacacaccttgggagcctgtgatcccccttgtttctcaagagagggtgactccttcatggtttctttcttaagacacccctctcactcaactggagcaagagtgtagatttttgatgttggaatgagggttaaggtttacttaaaaagcagcgaaagtttgttaagcgcttgtttttaattaagcactctatatactgtgctttgagaggggaaggaaaaaaacatgaagatatcctcccagggttgaagtcagttttaagggggacataaatggacacaactaaccccagtaggtacacagtaactaattttaaaagcacttattggatgcctactgtataccaggtactgtgtggaggaagtgggaatgtagagataaaagataagactttccctcaagggacaacccagtatggtgaagggtcagagcattaaccagacagacagtggttgtcagagtatgatgaaggtgcttaagaatgttatgggactgtagaagagaggaggagcatctactcagacaggtaagggagtgtcagcaaagcctcccaagaatatgtaatagctgagtatttttttttgaggcacattgtagctccatcacccaggctggagtgcagtggcatgaacatggctcactgcagcctccacctcctgggtttaaaggatcttcctgcctcagtctcccaagtagttgagactactggcatgcaccaccacaccttatttttaaaattttttgtagacacaagatctggctatgttgcctaggctggtctcaaactcctgggctcaagtaattctcctgcctcagcctccaaaagtgctgggattacaggcgtgagccactacatctgctccccagagtttattcttgaaagatcatcgtgaattagcaaggggaagcgcattccaagccaaggaagtttgtggaaggtagagatgtaggcaagcctgactggtcccactagagcctggtgactagtgtgatgaagtcagaaagatgctcaggagacagataatgaaaggctttagatgccattccgaggagtttaatcctaaagacattaagaaggaaggcccattgaagtgcataaggaatgattatgaacagttcacctgtagcactgagcaatggagaatgaatggccttgaactggtcaagatggaggcggggagaccatttagggggctctggccatgatctaggtgagaagtggtaaggggataagccaaggcctgaagaataaagagttactaaggaggcggcattgatcggaactgagaactgattaaatgaagggagaagtaaggttgacacttaagtaacccagtgactagtagactattaactgaaagcagtaatggacaggagagtaagaagtggaaagagataaggtgaacttctgaatgctgagttaggcgtttctgaggatttctaaaaggaaatggcaagaagagagtttgtttagtcactgtggagagacaactatactaggagtaaagacacaggcaagtatagttgaagtgctggatatggaagagtcccctagagagtgtttgcagattgaaccaaaaagaaggttaaaggtgggaaccctaaagaacttcagcaattgcaggaagcaggtggggaaggaggctgaagagatgagactgagaaaggcaaacagccagagaaactggaggcaaaccaggagtgagcaagatcccagaaattaaataatgatagaagagaataaaaaaggtgtggaggtaggcagcatggaatgctgcagagaagtcaggcaaaataaggaccaaaaaatactttgtggtttgaggagctaagggttcagtggcaactttggcagaagtagtgttcattcggagatgataccagattgcagtatgtttcaaaggtatgggagaagagaaagtgaagcttgtgaattacgattttgagacccaatgaggacaagaatacgaaacagtaatgggggagaggggtataagggtaaagaaggcttgctttcttgccttgaaggagcagcttaagcgatacacgaaaggagagaagacacagtatatctctagccacacttaatctttttcagttccttggggattatactttctcacaatgaaactcttcagaggcttttcctgtccctataatgaagtggataagagtgattaaagtacaaaagatttttttggttttggtgggttttttttttttgtgacggagcctcactccaggctggagtgcagtggcgcgatctcagctcactgcagcctcaatcgcaggctcaagccatcttcccttgtagctgggactacaggcacacaccgccatgcctggcttattttttgtttgtttttgttttttgttttctgtagagatgaggtcttgctatgttgcccaggctaatcttgaacctctggcctcaaccagtcctcccaccttggtccccaaaatgttgggattacaggcgtgagccagtgtgcctggccacaaaagagatttaaaggaaggagagatggtatggctgtgttagtccttggggagaaattagtgtctgggatgagtcagtcatctgtgttgataaggtgagctgatcaggtttttccttcttaggtacttcagtagatccttcctcctaatgcctttaggattaaactccttggaatagcatataaagccttttattattaatcctgcacaatttttcaactctcacactagtcacccaatactgggctcagattttttttctttaacttttttgtttgttttttgtggtttgttttttggggaggaggagggccccaaactttgaaatgtgttctggatggaggatgcagattaagcaaagacagacataagcgtgcctgggacttcataaaggaacagaaagaagccagtatcgagaccagaggtgtgggtagggaaacagaaaagatagggtagggccattttagtctgtgaagcctttaattattggaattgtctctcgttaactctagttttttggagaagtagatgcacataaaactttcctgaataaatgattactttgaaatacatggaattctagtctgagaatattttaatgtagtagatggcggataccattgactttttttcttttttttttttttttttgagacagtctcgctgtgtcacccaggctggagtgcagtggcgcgatcttggctcactgcaacctccacctcccaggtacaagcggttctcctgcctcagcttcccaagtagctgggactacatgcgtgctctaccacgcccagctaatttttgtatttttagtagagatggggtttcaccatgttggccaagctggtctcaatctcctgaccttgtgatccacccaccttggcctcccaatgtgctgagattacaggcctgagccgccgcacccgaccaattttttttttttaatattaaatactgaaatgcttaagggtagaattagatagcagtgaatggaagggatgttttggaagagaagataataaataggcctaagcctgaagggaaatcatgaggctgcctccagtaggggagggagttggacatggtcctctaccttcagggaaacaaggatggagagggggagagctagaatctgttgaatctgttttggctttactgggaacacaggctaaacagtctctcaggttactctctagaatgaaagcacacagacaggtaaatatgacacaatgtgatttgtgctataatattcaagcagaacaagtaaggcatagactgaggtgttcatttgcttaccagataactctatttacatggcctataggttttacaaacaacgtgtccccctggccaggcacagtggctcaggcctataattccaacagtttgggaagctgaggcaggagaattgcttgaggccagaggttcaggattagcctgagcaacatagtgagacctcctctctaaaaattattatttttttaattaggcaggcatggtggcgcttgcctgtagtcctagctactcaggaggctaaagtgggaggatcacctaagcctaggaatttaaggttacagtgagttatgatcatgccactgcattccagcctgggtgacagagcaagaccctgtctcttaaaaaaaaaaaaaaaaaaaggagggtgtgtgtgtgttgtatacatgtgtgtgtatctacacatatctcccaaattgaatttataatatcttcttccttcctataagaccttctcttccactgcctccttaattaataaatggtaccacttagcccagctaattttgccagctaaaaacacaggagtcatctctgagtgctcttttttttttttttttttttttttttttgagatagagtcttgctctgtcacccaggctgcagtacaatagcgtgatctcagctcactgcaacctccgcctcctgggttcaagcaattctcctgtcttagcctcctgagtagctgggattacaggcgcccgccactatgcctggctaattttttgtatttttagtagagactgggtttcaccatgttcaccagactagtcttgaactcctgacctcaagtgatccgcctgcctctgcctcacaaagtgccgggattacaggcatgagccaccgcgcccggccgggtgctctttattccccacctctagccccatcctatgaattcttctttatgtccgcttgtcaccaccacccagactactctgacagcctccccagtggatttcccactatgcttattccctccgattcttgctgtactctgaagccagagtgaaactttaaagtgtgaaagtgatcataccaataaagtccccattccttaaccttgctacaaggccctcactccagccttaccttgcaccattctcccctcagtctgtaagcttagccataccaaacctttccctgtctctcagtgtgtgtgctttctcacagctgggcctgtgcacagcactggaattacaccatgtgtctgactaacttctcatactcctcattacttcagttatttgcttaaatgccatcttcttagagaggccgccaccagagatgaagccagcctctcccccaccaccaagtaggctttaccttttcttttggaaccttcagtacacctggaattacctatttaaaaatctctcttcctatagcctgcaagctccagaggagaccacatttgtcttgttcattgctataatcccctacgctagcacaatatctgacacatggtagctgtttagtagatacttagtggatgaatgaatagagatgggaatgattatttctgcaggagttgtgagacagtacaaatatttaaggagtgatagttaagctagaaaaataataaaataggatagaggctacagagatctttgcaggggggatcagactgctttggaatttgcagataagcattcacgatgtccgcttaactttctagacaaagtggtgaagaaagggaagaaggacaagaagatcaaaaaaacggtgagaaaatgagggttgaggataagaaatgactatggatgtttccaagctaaataaatagccatgtgaaggaggtgggaggtccaagggaggagaaaagatcttgtcaagagaggagataggcagggcacggtggcttacacctgtaatcccagcgcttagggaggcagaggtgggaggatagcttaagcccaggaatttgagacctgcacactccattctccacaaaaagaaaaaaaagagagagacaggaggtaaggtgagggtggagtggagggccagtgggccaatgtgtggcagagcacagcctgcttggattgctcttggaaacatgtttacctgtagcttaactccctttatagttctttgaagagctggcagtagaagataaacaggctggggaagaagagaaagtgctcaaggagaaggagcagcagcagcagcaacagcaacagcaggtacaagtgccacagggcccaccaatcctgggaggcatctgggttccaccaacccctttccagcccatgttgctccattcagctgatggggaaccctctgtgaggcagaaatacagcaggggcctgggcttcattttctcactgttcttttgctctcagcagcaaaaaaaaaagcgagatacccgaaaaggcaggcggaagaaggatgtggatgatgatggagaagagaaagagctcatggagcgtcttaagaagctctcagtgccaaccagtgatgaggaggatgaaggtaaatgacctgagggggaatgggtacctggaatccatgagtcatggagagtgatacctcataccctgatcttcaagttggattcaattggggggccagacattgtaattctttcctatctcatgttctccccctgtcatttcagtacccgccccaaaaccccgcggagggaagaaaaccaaggtaagccatctgtgtggtaaacggagactccaaggatgcaaccttgaccatcctactgacttctgtggccctttcattctctagggtggtaatgtttttgcagccctgattcaggatcagagtgaggaagaggaggaggaagaaaaacatcctcctaagcctgccaagccggagaagaatcggatcaataaggtgacagtggtggctcgatcagtcactctcactccatttaacaccttctggccatggtggagtaatttcccgcttttaaactagctcttctcggtctgtcttacttatactgttaaaatcatctttttagaatacatgcccaggctgggcacagtgggtcacgcctgtaatcccagcactttgggaggccgaggtgggcgaatcacgaggtcaagagatcgagaccagcctgaccaacatggcgaaacctcatctctactaaaaatacaaaaattagccaggcgtggtggcgtgcgcctgtaatcccagctacttggaaggctgaggcaggagaatcacttgaacttgggaggtggaatttgcagtgagctgagattgaggcactgcactccagcctgggcaacagagcaagactcagtctcaaaaaaaaaacaacaaaaaaaaccatgccatttttatcactcagaaatctacagtgattctgttgctttaagcacagaacctgaaacaaagccccaggtccttgctcttctacttgtgactcttctgcgtgtgcatcttagtccatgtccatttgagctcttgagaaagcctccagtgctagtgccactcactctggtggcgcacttgcctgacttataatccttagccttgctgacgttccctagttatctcttcgctatctagtctgaagctggagggtagggtttttctgggtctcatttttcgtcagcagcactcaatacagatggtctccaacttctgcttcggtgtacgatttttctactttatgatggtgtgaaagtcatactcatttagggtactcctcaactcatgatgggattatatccagataaacccatcataagttggaactatttttttttttttttttttttgagacggagtctcactctgttgccaagctggagtgcagtggcgtaatcctggctcactgcaacctccgcctcccgggttcaagtgattctcctgcctcagcttcctgagtagctgagattacaggcacgtgccaccacgcccagctaatttttgtgtttttagtagagacagggtttcaccatgttgaccaggatggtctcgatctcttgatcttgtgatccacctgccttggcctcccaaagtgctgggattacaggtgtgagccaccacgcccggccaagaactatcattttttatttaagtttctggtgggtttatcgggatgcaacctgtcgtaaatggaggagcatgtgtatggttaacacagtagactctctagaaatgcttattacacagcaaagtagcacaataatttgtatgtatgtgtgtaatgtgtatgtgtgtctcctccaggccgtatctgaggaacagcagcctgcactcaagggcaaaaagggaaaggaagagaagtcaaaagggaaggctaaggtgagagagtaactagcaggaggaggtattggggcccaggaattaaaacatttcatcagggctgggcgcggtggctcacgcctgtaatcccagcactttgggaggccgaggtgggcggatcacgaggtcaggagatcgagaccatcctggtaacacggtaaaaccccgtctctactaaaaatacaaaaaaaattagccgggcgtggtggcgggcgcctgtagtcccagctactcgggaggctgaggcaggagaatggcgtgaacccgggaggtggagcttgcagtgagccgagattgcgccactgcactccagcctgggtgacagagcgagactccgtctcaaaaaaaaaaaaagaaaaaaaaaaaaacatttcatcagacctgtcttttccctattagcctcaaaataaattcgctgctctggacaatgaagaggaggataaagaagaagaaattataaaggaaaaggagcctcccaaacaagggaaggagaaggccaagaaggcagagcaggtgtgtatttggtgttggggcaaggtggaatgagggactagggcttccagggtccttatgggagagttagaatctggggatatagttattatcccagcaaacctttattcttttctttttttgggggagtagttggggtggtggttcgtttgtttttgtttttgtttttgtttacacaggatcttactctgtcactcaggctggagtgcagtggtgtgaacacggctcactgaagcctcaacctcctgggctcaacagattctcctgcctcagcctactgagtagctgggactacaagtgtgcaccactacccctggctaatttttttatttttagtatagagatgaggtctcactatgttgctcaggctggtcttgaacttctgggctcaagcagtcctcctccctcagcctcccaaaatgctgggtttacaggtgtgagccagcatgccagccagcaaactttttctataaagggccatatagtaaatgtttttggctttgcaggccacatacaatctctatcacatattcttttttttttttaacaactctttgaaaatacaaaaattatttttataaagttcaggagctatataaaaataaatgtcaggtcagccttggcccatgggctgtagtttgcaacacctaatccagtgaagaaagggcctggaatttatctcagatgatctgggtcctggctctgccttcactggctgtgtgaccttgaatacatcttcccatccccttgggtctcacttgtctcctttgtgtgatagaaggaggagtccggagatctctagggtccctatgcgtctggcacttcctaattctgtgattctgctggattcctctgactgtgcactagagcttcctgatctttttttttttttttttttttttgagatggagtctcactccgttgcccaggctggagtgcggtggcgcaatctcagctcactgcaacctctgcctcccgggttcaagcaattcttctgcctcagtctcccgagtagctgggactacaggcacgtgccaccatgaccggctgattttttgtgtttttagtagagacaggatttcaccatgttagccaggatggtcttgatctcctgaccttgtgatctgtccatcttggcctcccaaagtgctgggattacagacatgagccaccgtgcccggacggctacctgatcttttctttgcatgttaacaaggaaaccacagaaactcattttatacaaatgaaactcttgaaatccatttactccaccttcagttacattgtattgggagttacatttatagggacataacgcgttgtcacatttcataaatacacattcataccatttgtcttgtaccattcctggtagcagaaattaataaaggacctcagggagaccaggggctgggtatgagaatgagagaggatcccaagatattttaggactctgagtagtgaaggaaagagctggggcagggacagggggcagatgatgtgaaatctgagttctagaaggagtccctagtttttttttgttgtttttttttttgagacggagtcttgctttgtcacccaggctggagtgcagtggcacgatctcggctcactgcaagctcctcctcccaggttcacaccattctcctgcctcagcctcccgagtagctgggactacaggcgcccgccaccacgtccggctaattttttgtatttttagtagagatggggtttcaccatgttagccaggatggtcttgatctcctgaccttgggatctgcccgctttggcttcccaaagtgctgggattacaggtgtgagccaccgcgcccagccaggagtccctagttttgaccatccccgggttctcacagggttcagaggaagaaggagaaggggaagaagaggaggaggaaggaggagagtctaaggcagatgatccctatgctcatcttagcaaaaaggagaagaaaaagctgaaaaaacaggtaagaccttggttcttagcggtcaaaagtaggggatttttaaatacttcaactaggggacatgcgattggggacacgaaggaaaggtttgggggctactccaagtaaaacaatcggagtaagaaaataattgtgttctgtgaaccttatctcaatgtctgatgacatgggctgtttcactttggggttttttgtttattttttgagacagggtctcacactgttactcaggctggagtgcaatgacgtgatctctgttcactgcagcctcaacctaccaggctcaagtgatcctcccacctcagcctcccgaatagctgagactatgggtggcaccaccatgcctggctaatttttgtattttttgtagagacagtattttagcatgttggccaggctggtctcaaactcctgagctcaagagatccacctacctcagcctcccagagtgctgggattacaggcgtgagccagcatgcccagccagcatgggctgtttcatggtgatgggaaactggtagactgtggcttcaaatgtagtttttcctaccttctcagatggagtatgagcgccaagtggcttcattaaaagcagccaatgcagctgaaaatgacttctccgtgtcccaggcggagatgtcctcccgccaagccatgttagaaaatgcatctgacatcaaggtaaggtctcaaggggccccttccagtccacttacctagggaagagccagttctctcatcttccctgagtggctgtggtgtgtgaatgggttagttcagtgggaagaaagattggaggcattttccacaccttaggttctgccaacttgagcaagaagatagaaaaaccagtagaagtggggtccacccttggcagaaaatagtgtgggacagactagactagctgaggatgcatggggctcccattacaggcagcgaacagggcggggaccggctgtggggagaggaaggggattatgctggaggtagcggtttgtcaggggcttccctgcagggagaaagtggccgctcctgtcccaaagggagaattttcatgtgatcatcccttccctctgccacctctttcctgatggctgcagctggagaagttcagcatctccgctcatggcaaggagctgttcgtcaatgcagacctgtacattgtagccggccgccgctacgggctggtaggacccaatgggtgagaagaggagggagctggaggcaaaaaagggcctggagggaaaagaagagatttctcagtggtggccaggtcctaatagcttttattccccagcaagggcaagaccacactcctcaagcacattgccaaccgagccctgagcatccctcccaacattgatgtgttgctgtgtgagcagggtgagaccactggggagaaaaggggcttggtggggtgggcagttgggtagaaaagccagccagccaagaatagaagaaattgtggctatggagttggaagggatgtggagggagactggagaccgggaaagggatgctaaggaaaggaggggagggtcaatgaggaacttgagagtgttttatttggaacaagtacaaagagctgggcagggtcaggcaaaacagaaatgtaattgaagggaaagaaagatgagactcttggctcttgaggctgcctgactgttctccctctgcctcccagaggtggtagcagatgagacaccagcagtccaggctgttcttcgagctgacaccaagcgattgaagctgctggaagaggagcggcggcttcagggacagctggaacaaggggatgacacagctgctgagaggctagagaaggtagaggagatggcgcaggggacacgggcaaagacttgggggttcctgggaccctcagacgtgtgtcctcttctccctcctcccaggtgtatgaggaattgcgggccactggggcggcagctgcagaggccaaagcacggcggatcctggctggcctgggctttgaccctgaaatgcagaatcgacccacacagaagttctcagggggctggcgcatgcgtgtctccctggccaggtgggccattcacctcactgccctcccttccagcctcagaccaccggggcccttttcctctttcccttctcattcttccaaggccaatagggaggctcaaggcttacctctccctccttactatctgtgttgtgagaacttagggtctttctctatttctctccctacttggtggtgagttctcatcaacataccctgcagctgggtgcaatgggtcacgcctgtaatcccagcactttggaaggcagaggcaggaggattatcttgaacccaggagtttgagaccagcctgggcaatatagtgagactctatcttcacaaaagggggaagaaaacatatcctagcctgggcaacatagggagaccctgtctctacaaaaaatttaaagatcagctggatatggtggcgcacgctgtggtcacagctactctggaggctgaagtagaagtatcacttagacctgggagatttagactacagtgagcccttattgtgccactgcacgacagcctgggcaacagggcgagaccctgtctcaaaaaaattaaaccgtatcctgcccgagaacttctctgaggagagcttgggaaggagtgttcatggtctcaggctctatctccgagttttctctggggttgtctgagcaaggatctttctctccctgaccctgccctctgctacccaccctctagggcactgttcatggagcccacactgctgatgctggatgagcccaccaaccacctggacctcaacgctgtcatctggcttaataagtgcgttacggcctttgcatcattggttcccattctgcactttcttccccttccctccctgccctgttttcctttagcccttctccactgtgcctgtgagtggagctctattcagacccccctttccctcccagcccccgttgtctgcctgcttcctctgaattctctctcacttgaccactgtgacacttacaccctgttctctgaaacccagctacctccagggctggcggaagaccttgctgatcgtctcccatgaccagggcttcttggatgatgtctgcactgatatcatccacctcgatgcccagcggctccactactataggggcaattacagtaagtaggattgtgtgtggatgcagggaagagatagaacctcgaaaagaggcctgagtgggagggcctatttagataaactgaatcctgtcagaattccagacagtgatgcctaccccatcaccaccagtccctggttgtccctttgctgggaagaggagcaaccactgatgcctggtcccctcttctgccccagtgaccttcaaaaagatgtaccagcagaagcagaaagaactgctgaaacagtatgagaagcaagagaaaaagctgaaggagctgaaggcaggcgggaagtccaccaagcaggcggtgagcacctgagggacttctgggctgggggccactgttctctcctggcagtggaggaagaaggagactctggaacgctggcctacatttcaaggactgccgtgcagggctcaggtttctcttttttcctcttcctctccaggaaaaacaaacgaaggaagccctgactcggaagcagcagaaatgccgacggaaaaaccaagatgaggaatcccaggaggcccctgagctcctgaagcgccctaaggagtacactgtgcgcttcacttttccagaccccccaccactcagccctccagtgctgggtctgcatggtgagtgccgcgggcctctgctgctccacaggaagcaccggaagcatgtatgtgcaccctaaattctccaccaaggctgagattgctcctgttctccaaggccagcacatgagagggactttgcagggactgaaaagaatataaattgcttcttttcgtggctttcaggtgtgacattcggctaccagggacagaaaccactctttaagaacttggattttggcatcgacatggattcaaggagtgagttggcggggttgcctcagggatgtgtagcaggagccacagggagagtctctggggacctctttgaccacctgtcttccatcttgcagtttgcattgtgggccctaatggtgtggggaagagtacgctactcctgctgctgactggcaagctgacaccggtgagtcctggagccaaggagggagagcatgagaaatgtgaagacacagctgcttttgccagaagctggaatcagggagcctctcgagaatgtagagttaaatacagaactcatgatagatgattcatttccctaagaggggcagtagaggaggaaagagcttagatcagttcaggggggagagctaagagaattaagatagaactagggggcacacccacgtgttttggttatacaagaaatatatgtcttttatagaacgattaaaaattgcataaacgggccaggcacagtagctcactcctataatcccagcagggatcacctaaggtcaagagttccagaccagcctagccaacatagtgaaccccgcctctactaaaaatacaaaaattagccgtgtgcggtggcgcgcacctatatcctagctactcaggaggctgaggcagaattgctggaacctgggaggcgggggttgcagtgagctgagattgcaccattgcactccagcctgggcaacagagcgagactccatctcaaaaaaaaaaaaaaaattggcctggcgtggtggctcacgcctataatcccaactctttgggggaggctgaggcaggcagatcacttgagcttaggagttaaaaaccagcctgagcccagtgtggtggctcacacctgtaatcccaacactttgggaagccgaggtgggagatcacctgaggtcaggagtttgagaccaacatgaagaaaccccatctctactaaaaatacaaaattagccagacgtggttgcacatgcctgtaatcccagctattttgggaggctgaggcaggagaatcacttgaactcaggaggcagaggttgcagtgagctgagattgcgctattgcactccagcctgggcaacaagagcaaaactccgtctaaaaaaaaaaaacagaccagcctgagcaacatggtgaaatcccatctctactaaaaatacaaaaattagctgggtatgttggtgcacgactgtagtcccagctactcgggaggctgaggtaggagaattgcttgagtccagggggcagaggttccagttagccgaggtcgtgccactgcactccagtctaagtgacagagtgaggctctgtcaaaaaaaaaaaaaaaatgcttaagagaaaaatctggagataaccagttttttttttttgttattttgttttgagacggagtctcactgtcgcccagcctggagtgcagtggtgcgatcttggcccactgcaacctccacctcccaggttcaagatattctcctgcctcagcctcctgaatagctgggattataggtacgccccaccatgcccagctactttttgtatttttagtagagacagggtttcaccatgttggtcaggctggtctcgaactcctgaccttgtgatccgcccgcctcagcctcccaaagtgctgggattacaggcgtgagcaccgctcccagctgagataaccagtattaatgttttagtggatatctttctccttttttctttgcaaatgtgcatataatttttaacaaaaatgggctgtcatatgagttgttgtgtagctagatttttccaaatatatcaagcatttttccatgcaattacttatttcatatgagtctaccttttttttttgagacagagtctcactctgtcacccaggctggagtgcagtggcacagtcttggctcactgcaacctccgtctcctgggttcacgcgattctcctgccttagcctcccgagtagctgggacaacaggcgcgtgctaccacgcccagctaattttttgtatttttagtagagatggtttcaccgtgttagccaggatggtcttgatctcctgacctcatgatctgcctgcgtcggcctcccagagtgctgggattacaggtgtgagccaccacgcccggcaaactctaccattttatttgaacttttgtaatatattgccatctagtgtgttagaaagtttgtagccatttctgctctctctagcagtgttgagaggccattttctcatatccagagattagatctttagaaaggtattattagattctccccaaaacactaaacttgccacatgaggcccttacgatgtaccattcgtgagtctcgctgtatggagagcaggtgttctttggctgtggttagtccctcctgcttgtccctcttgtcctccattttgcttaactccccttttgtcccttaactcttttactttgctcaccatgcctttgtcatattaggggaacatccctgttccttttcttttttgagacaaagtcttcccctgtccccgagggtggagtgcagtggtgcgatctcagcaacttccacctcctgggttaaaaccattcttgtgcctcagcctcctgagtagctgggattataggcatgtcccactatgcccagctaattattgtatttttagtagagacagggtttcacaatgttggccagcctggtctcaaactcctgaccttaagtgcctcctgacctgccttccttggcctcccaaagtgctgagattacaggcatgagccaccgtgcccagcccctattccttttcttatgcatacttgtccctggcccatttctggtgtttgtctctccttcagaaaagttggtgtatggacgaggtcaggagatcgagaccatcctggctaacatggtgaaatcccgtctctactaaaaatacaaaaaattagccgggtgtggtggcaggcacctgtattcccagctactggggaggctgaggcaggagaatggcgtgaacccggaaggtggaggttgcagtgagccgagatcgcgccactgcactccagcctgggggacagagcgagactccgtctcaaaaaaaaaaaaaaaaagttgatgtatggagctgcagcacctttttcccttgccctcctcttaactactttgtcttcccttgcagacccatggggaaatgagaaagaaccaccggctggtaagttggcattgggatttagggaatgataatctgatggaggaagtgtgactttaaccgaccacctccctctcttctcgggcagaaaattggcttcttcaaccagcagtatgcagagcagctgcgcatggaggagacgcccactgagtacctgcagcggggcttcaacctgccctaccaggatgcccgcaagtgcctgggccgcttcggcctggagagtcacgcccacaccatccagatctgcaaactctctggtaccacttcaggggccagggagggtgcccttcaccttatcattcatgtctacaaactgtacctagaggaaccgagaatgagggagcctcagctcacaaactggcacatcttgagggtttgccttcagaatgtgaggtgctaggtgtgacagccctccccttcctttgctacaggtggtcagaaggcgcgagttgtgtttgctgagctggcctgtcgggaacctgatgtcctcatcttggtgagtgagctgggctgtgggaaaagggataagggtaacagtaatggaagacgggagttgcagtgctcagtcatggaattcctcctatgtaggacgagccaaccaataacctggacatagagtctattgatgctctaggggaggccatcaatgaatacaagggtggtaagtcagctgagagtgtgccctcatccctgctccatggggaccaagctgtagtgtccttcactacagaagggcctaggactcccttatttcatgttctgattcccctctttctcctttcttcctgccctctgttgttgctatctttcttcaaagctgtgatcgttgtcagccatgatgcccgactcatcacagaaaccaattgccagctgtgggtggtggaggagcagagtgttagccaaatcgatggtgactttgaagactacaagcgggaggtgttggaggccctgggtgaagtcatggtcagccggccccgagagtgaagctttccttcccagaagtctcccgagagacatatttgtgtggcctagaagtcctctgtggtctcccctcctctgaagactgcctctggcctgcagctgacctggcaaccattcaggcacatgaaggtggagtgtgaccttgatgtgaccgggatcccactctgattgcatccatttctctgaaagacttgtttgttctgcttctcttcatataactgagctggccttatccttggcatccccctaaacaaacaagaggtgaccaccttattgtgaggttccatccagccaagtttatgtggcctattgtctcaggactctcatcactcagaagcctgcctctgatttaccctacagcttcaggcccagctgccccccagtctttgggtggtgctgttcttttctggtggatttaatgctgactcactggtacaaacagctgttgaagctcagagctggaggtgagcttctgaggcctttgccattatccagcccaagatttggtgcctgcagcctcttgtctggttgaggacttggggcaggaaaggaatgctgctgaacttgaatttccctttacaaggggaagaaataaaggaaaggagttgctgccgacctgtcactgtttggagattgatgggagttggaactgttctcagtcttgatttgctttattcagttttctagcagcttttaatagtcccctcttccccactaaatggatcttgtttgcagtcttgctgacagtgtttgctgtttaaggatcataggattcctttcccccaacccttcacgcaaggaaaaagcaaagtgattcataccttctatcttggaacatgggtctctttcctttttttttttttttttttttttttgacagaatcttgccctttcactcaggctggagtgcagtggcatgatcttggctcactgcagcctccacctcctgggttcaagcaattttcctgcctcagcctcccgagtagctgggattacaggcacacaccaccaggcccagctaattttagtgtttttaatagagacagggttttaccatgttggtcaggctggtctcgaactcttgacctcaagtaattcacctaccttgacttcctaaagtgctgggattatagggatgagccactgtgcccaacttctttttttttctcttttctgagacagggtcttgctgtgttgcccaggctagagtgcactgtaccctcaacctcctgggctcaagcaatccttccacctcagcctcctgagtagctgggactacaggcatgtgccgccacactcaactaatttttttttttttaatttttagtagagacagtgtcttgctatgttgcttaaggctggtcctgaactcctgacctcaggcagtcttcctacctcgacctcccaaagtgctggggtgctgggattatagacgtgagccacgacgcctagccagaatttgggtctcattgtccaagttaatctcatgaatgaggaggtgctctgccctgtggccagggaccagggtattgattctctcaaaaattattaaatcatctagccaaaatgtacggtactgtggggtatataagaagggaagagacaagatctgccttcattaatagtctggttagagaagacttaaaagtaagcatgaatagataattaatttgatcaattgtctaatatgtcgtactctagattctaagttgccacatactcaaaaaagggaaagattatccagggcctgattatttgacagggtcacttgagggtagatcttgaaaaatgatgatttgactaatcagggaccagggagccatttttcagaagtaggaaaagagcagatctcaggcttggggggaagaacaagctacttgggagttaatggatgatagctgctgtggccatttttcttaagagttagactggggagatgggtttggaaagtaaaatgcaaatggtgggtagtggtattaggtggtgatgtgcaaggcgtgctgtagaaacctgcagggtgaagcccataacttttgttacgggaatggggtaactgaatcctaaactagctaggggagatagggatggaaagagcagatgtggaggttggggagaagggagtgacaggagatatatccagttccagagggaatagggagagctgtgtggctaagatttaactgtttggacatttaatttggggaaattgttttccagccaagtgaataaataatactggacttcaagtacaagcttcatacaggaagtgaagttttggtgtggagatagctgcatagtcagggaacactctaaattaaaaataaggaggccgggcatggtggctcatgcctgtaatcccagcactttgggaggcgggcagatcatgagatcaggagttcgagagcaccctgaccaacatattgaaaccccatctccactaaaaatacaaaaaaattagccgagcgtggtggtgcacacctgtagtcccagctactcaggaggctgaggcaggagaattgcttgaacccgggaggcagtggttgcagtgagccgaggttgcgccactgcactccagcctgagcaacagagcgagactctgtctcaaacaaaaaccaaaagacatcaggaaacatgcctcttatggaatttgagggggaaaagtcagggtcttggcagtgaccttggacaagccattagcctcttgatacctcttttctcatctgtaaaatgaaggtggtagttacctacttcacagggttattaggggattcaatgtgtaataatacgtaaagtgccttaaattctgttgcttttgttatatgtatttcatattatatatatatatatatatatattttttttttttttttgagatggagtcttactctgttgccaggctggagtgctgtggcgtgatcttggctcactgcaacctctgcctcctgggttcaagtaattctgctgtctcaccctcccaagtagctgagattacaggcacgtgccaccacgcccggctaagttttgtacttttggtagagatcaggttttgccatgttggccagtctggtctcaaactcctgacctcaggtgatctgcccacttcggcctcccaaagtgctgggattacaggcgtgagccaccgcacctggcctatacttttgcatttttaagtttttacttcgctagtctagttgagatgatacataaaatatataggaatgttatttataaagtgaataccagcttgcatttcaaatatttggtcactaatttcactacttcaaacataagtgagaaaagtactttaagtactccaaaataactttccgccacaggcataaatttcatttctctctctgttctttttttttttttttttttttaaagatgaggccttgctatattgcccaggctggtcccaaactcctggcctcaagcagtcctttctcctaggctccccaaagtgctgggattacaggaatgagccacggcacctggccacaaactttatctcctcccgtgtatgttttaacttctgtgatccctgtagccaatcatatgtgctgttaatggaattaataattcacctaaatgtgggcaaaagtatgccctccaaaaagcagcatagaaatggaacacgaaagggaaacatttccatggtagcgcatggaaatttcattaaccaaattaaattgttttatttataaacagcttattacctacaagtgatgcacatatgtggtacacagtaaacatcgtagaaatgtgttttttgttgttttgagatgtggtctccctctgtttcccaggctggagtgcagtggcacaatcatggctcactgcagcctcaaccctctggactcaagtgatcctcctacctcagcttctcaagtagctgggactacaagtgtccaccaacatgcccagccaattttttaatttttttgtagcaaagaggtcttgctttgttgcccgggctggtctcagactcctgggttcaagttatcctcccacctcagcctcattaaagccaaagcctgaaggtaggaaaggaagagccttcagggaagggaccaaaatgtgcaaagaccctgaggctgaaaagagctgaacatggtcaaggaatggctggagctgagaacttgagcatgcgccaatacacacggggccttatatgcatagacagcaggttgggatgtgatgaggagaggctgagcaatgggaggccattggttctgtttagccaggagtgcaaactgattcagttttcatttttacaaaattgctcctggctgctaggtggcaaatggtgtggggagacagggaaaagagatgccaggagaacagctcaatattactttggaaagaagattctcttcatctaagaatggaatggaagggagataatgtagactcagatatttccatgtgaagggaagggaaaatgttgctcacagtggatgggactcactttttcccaagctttggtgccagagaatcaagaagagtaggccgcgcacggtgcctcatgcctgtaatcccagcactttgggaggccgaggcaggcggatcacctgaggtcaggagttcgagaccagcctgaccaacttggcaaaacaccgtctctactaaaaatgcaaaaattagccaggagtagtggcacgcatttgtaatcccagctactcaggaagctgaggcaggagaattacttgaacctgggaggtggaggttgcagtgagcggagatcatgccattggactccagcctgggcaacaagagcaaaacttcgtctcaaaaaaaaaaaaaggtttgctgagcagcagtaagtgtagaatcaatgctaacattaatttgtactgggctaagatagtaggattttgtgatttttcaacattaggtctactgcccaggagtaggaatgaaagaaataggataatgattctgaattgaagatagaccccgttgcacctggggaaggattgacagaaagagaacgttgaatgtcacaagggtattttagagggaaaaaatggaagcagaaaggaaaaacagactgaaacggtagagagaaaagtgcctgcagggagggcttggtgaagaaacatcattgtagtgaaatgaatgaaatgttcaacctctctccccctgcaaaaaaacaaaaaacaaggaaaatcttctctttatataatctaaagtttttacgtaagtaaaaaggaacaggtaggccgggtgccgtgactcacacctgtaatcccagcactttgggaggccaaggcgggtggatcacctgaggtcaggagttcgagaccagcctggacaacatggtaaaaccccatctctactaaaaatacagaaattagccaggcgtggtggcaggtgcctacaatcccagctactcaggaggctgaggcaggagaatccttgaacccagggggcagtgagccaagatcgtgccatttcactccagcctgggcaaaagagtgaaacttgtctaaaaaaaaaaaacaggtttctttgaatttttttttttttttttttttgagatgaaattttgctgtcacccaggctggagtgcaatggcacgatctcagctcactgcaacctccgcctcctgggttcaaacgattcttctgcctcagcctccagagtagctgggattacaggcaccagtcaccacgcccggctaattttttgtatttttagtagagacggtttcaccatgttggtcaggttgccctcgaactcctgatctcaggtgatccacgcgcctcggcctcccaaagtgctgggattacaggcgtgagccaccacgcctggccgaattttcataaatgatttgaaagaaaatgagctcattctttcttttttttttagacggagtcttgctctgtcgccatcctggaatgcagtagcgttatctcggctcactgcaacctctgcctcctggattcaagcgattcccctgcctcagcctcccaagtagctgggactacaggtgcgtgccaccactcccggctaattttttttttttttttgagacagagtcttgctctgtcgcccaggctggagtgcagtggcgcgatctctgctcgctgcaagctccacctcccgggttcatgccattctcctgcctcagtctcctcagtagctgggattacaggcacccgccaccacacccacctaagtttttgtatttttagtagagaaggggtttcaccttgttagccaggatggtctccatctcctgacctcatgatctgcccgcttcggcctcccaaagtgctgggattacaggcgtgagccaccgcgcctggcaatttttgtatttttaatagagacggggtttcaccatgttggctaggatggtctccatctcctgaccttgggatttgcccgcctcggcctcccagagtgttgggattacaggtgtgagccaccgcgctcggccgagcttattcttaaaatacagtaaaaactttaagctctcttttaaggttcttgtggcttgttgcaggagatagaagaaaggtgagaagcaggcagtaaatggaagcagaaagagacacaaagttgtgaccactaggttgtgacatgtttgggttttttcacttgagctgtatacttctttggcatttcacgccctagcctggtccttagattatgtcttctcaggtcttctcccagtgcacacagcaacaacagactgacctgaacacctccgcccacacacaccaagcctgggcaaggggaaggtaaaactacccactttgggcctacatgcagtgaggcctttcagatactgataaaacattgttgccccctcatgtggccaatgctggaaatacagctgagacacgtattccagggcagtgtagcagcctcagcaactgggaatttgttagaaatgcatatctcgggatccatcctgacctactaaatcagaattttgctggaccctacccccaatctgtctgttttttctttttgttttgtttttgttttttgagatggagatggagtctggctctgtcacccaagctgaagtgcagtggtgtgatctctgctcactgcaacctccacttcccgggttcaagtgattctcctgctttagtctcccaagtagctgggattacaggcgcgagccaccatgcctgactaatttttgtatttttagtagagatgggatttcaccatgttggccaggctggtcacaaactcctcacctcaggtgatccatccgccttggcctctcaaagtgctgggattacaggcataagccactgcatccaacccaaatttgtttttttttttctttcttttttttttttttttttgagaccaagtttcgctcttgttacccagactggagtgcaatggtgcgatctcggctcaccacgacctccacctcccgggttcaagcaattctcctgcctcggcctcccgagtagctgggattacaggcatgcgccaccacgcccggctaatttttgtatttttagtagagacgggggttctccatgttggtcaggctggtctcgaactcctgacctcctgatctacccgccttggcctcccaaagtgctgggtttacaggtataagccactgcacccggccccagatttgttttctaataagctcttcagatgatcctgatgaatgctaacagacttgaaaaccgccattctcaacccacatgttaaaacatgttaatatcttcaactgccccatatctgccacacacactccccccagagtgatgtatcctttctttttttttcagatggagtttcactcttgttgcccaggctggagtgcagtggtgcagtctgcaacctctgcctcctgggttcaagcgattctcctgccttccgagtagctgggataacaggcgccagtaaccacacccagctaatttttgtatttttagtagagatggggtttcttcatgttggccaggctggtctcgaacttctgacctcaggtgatccaactgcttcggcctcccaaggtgctgggattacaggcgtgagccaccacgcccagctttaatttctggtttaagagtggaggccaggcgcggaaatggggaaatggagtttccctatgttgcttagggtagttttgaactcctgggttcaagtgatcctcccatgtgggcctcccaaagtgctgggattacaggcgtgagccaacatgcccagctttaatttctggtttaagaagagtggaggccaggcgcggaaatggggaaatggagcttccctatgttgcttagggtagttttgaactcctgggttcaagtgatcctcccatgttggcgtcccaaagtgctgggattactggcttgagccaccatgcctggccagagccactttgggaagagcagtctatacttaccctttgtttttttgtgacggaattttgccctgtcactcaggctggagtgcagtggcatgatctcggctcactgcaacctgcacctcctgggtttaagggattctcccgcctcagcctccggagtagctgggttataggcacccagctaatgtttgtatttttagtagagacggggttttgtcatgttggccaggctggtctccaactcctgacctcaggtgatccacccacctcgccttcccaaagtgatgggattacaggcatgacccaatatgcctggctttttttttttttttttttttttgagacagggtcttgctctgttgctccggctggattgcagtggtacaatcatagctgtgagtttgaactcccaggctcaagtgatcctctcgcctcagcctcccaggtagctggaactaaaggcatgtgccaccatgcctaatattttttgtattttttgtacagacctggtctccctatgttgctcaggctggtctcaaactcctgggctcaagtagtcttcccacctcggcctcccaaaagtgctgggattacagacatgagccactgatacccaacactaacctggctaaggtcacccaggctgtagagaggtagagctgggacaatggcctttatctgactccagcatcctcaggatttcctcccttatctgtagaatgtggataagatgaccaagaacacatcctagagggcacgatagccaggataggactgttctaggaacacacacgaggcgtgttaaagaagactcagaaagatgaaaaccaggaaagagccctgtggccgagatctactctgtatcctagagtattttatgtactttttgaagcattttttcaccagtacttaatagcaactgttagatcaagcattagctccagaggagtaaaaatcagattccacagatttgtactaatgtatctaacacaggtggtaatggcttttaaaaaaaaaaaatgaaaaacagtccaggccgggcgcggtggctcacgcctgtaatcccagcgctttgggaggccgtggcgggcagatcacgaggtcaggagttccagaccagcctggccaacatggtgaaaccaagtctctactaaaaatacaaaaaaattagccaggcatggtggcaggtgcctggaatcccagctactcagaagactgaggcagaagaatcccttgaacccaggaggcagagattgcagtaagccaagactgcaccactgcattctagcccaggcaacggagcgagactccgtctcaaaaaagtccaaacacactaggggttaaataagctgcttctctttccactgtttattattaatgtacaaaatatacaaaaccaaaaaaaaaaatactcatcctcaaatccattttggctctaacccaagaccctgcacaaaacccaaccaatccactgttttcatagaaaacaactgatgccaaagtgaaggagagaactgggaaagggcaaaatcatcttgttgaatccacccaggaaggcgcctggtggggattcagaggtggttgacagggtgaagtacctggaagcctccttcacgctggcaaggttccaggtgggagcagggagtgagctgactcccaaaggcagtgcatgtagtgtgactttcaggcccagcacgccgggcccaagttgatgagaagctggtctcactgaagtattttatcaagtctccagactggctatagttggcaaaggcagaccagcaccaccggtctcacctctgccagctaaaacttgcaccggatgcagatacgagttcgccatcatcgaacctagcagacccaggacgcagactgggtgttcacagaaagttgaaggtcccacttgagaaaggactaagaatggtgagcccacgctgggggaggggtggggatgatgtgtgttccagaactcaaatccagctgattgagccctctcagtgcagtgggatatacaatacccctttcagcatctccccaccccatgaggaataatgaacttagttgggatgatttcttaagtgcagctgatcctgtgtcagagttctgtgtgcatgtggggacccgcaatagaagggtaggggtgttcgccaggataaccagctttaggttctcaagcattaagggtaatactggaaaggggtttggggtacagggcgaatcttctcaaaaagtgaagccaactgggtctcctcttcagcagtccaggaacgtttccagtctctctcctccccagactggaggaaaatatgtacatcaatgcgcaccagtgatcagaaaacccccaggaacccaagcaagtgggaactgagggggccggctcctcatcagctggggaaaagggaaaatgggcctcacagaagccataacagggtggaaagagcgaggctgcagtccacaggggttgtgtgaacagggcaggcaaatggtccctagggcagggggggcccattgacacccgggtggtagaaggcacagttgttctcatagcggcagttgcccttcatcatgaaatgtcggcagacagggcggtttgacatgtctgtgggaacgatggcaaaacagttagacaggaaatagctgagggcaatgccaccctcaccaccccttgtccatgacatcctgagaactgtctttcagagacaatcttggggatttgggggaagggcatagagtaggaactgctatgcatactaggacatcaaagagacgggtacctcacgttctgcctagctaccaacagtagtgactctcacccactccccaaaagcttgtatgggacaaccaaaaggcatatgggggacagggagcatcctcacctcctccatggctgtggcctccatcgtgccctcggtggccccctcccccgtggccaggaccatcatggccacggtgctcatgaggtggcggccctcgatggtcatggcctcggtgaccagggacatcatgaggccggtggccatggggccccccgtgtccagggccttcatggggacgatgtccaccacttccacccatgcttccgccagggccttcgtgggggcgatgtccaccaccggcacccattcctccgccagggccttcatggggacgatggccactgccaccactgatgccaccgccagggccttcgtggggacgatgtcctccacccccacccatgctaccaccagggccttcatgggggcgatgcccacttcccatgccaccgccagggccttcgtggggacgatgtccactgctgttgcccatgcccccaccagggccttcgtgaggacgatgcccaccacctccaaccatgcccccaccagggccccctcgtccatttgggggtcctcctccagagcgacctcctctggcgcctcggaatggaggaggaggaggaggaggttcgtttcctcctcggccacctcggcctctatggtatggtccaggacctggtcctggacccccccgcattgggccaccccgcatagggtcgcccgggccatcccagaagggatcacctccccggggagggggtggaggacccagaagacgtggacccactggcccaccagggcctccatggggacctgtaaggggacaaaaaagagagacagtatcagctaccaggaactgccatctcccaacctaaaccaccacctcccaccttccagtcaatcctatactattatcagactgaaattaagcagataagcccattccaaccttttactcaccacctacctggcataggtcccccaggtccagggggaaagtgctgcatgcccttggggcccccaggaccccctggtgggaaaccattggctattgggccagggcctaggagtccatgtggcactgttaatgaaaacaagagtaacacagcatgagcactctagaagactagcatgatctcccatttaggtgcaaccaactgaccctctcaaaccaacctggcagagcaatgctctctctgtccagtcttcccctcccatttcttgcctagtggccacagccctgtattcttctgcatctttgaaaccctgcttcccccaactccactgcaggcttcctcccccagtcccctggggctggccctgaagattacccagcatctgcttgatcttgtccgaatagtctggttgtttcagtagttcctctgaaggatgactgtttgggctaccctgtgaggatgtaagaaggcaaagtcaacagacagaaagggtaacaaccatggcgaaagatagcgccaaagattaggggtaagtgggtagatgtggagaactggggtaaggcgaatgggagacagtgaggagagcgagcttaaggaggctccacagaaggtggaaaaggggaaggagggtgcgtaccatgatggaggtgaggatctcttggacattaatgcctcctcctccagggccttgggggccctttccagcacccatgcttcccataagattggccagaactggaggcaacttggagcctcctgccccatcaggtgagccacctgaccccccaggttccagagtctcaacatacggagtctcatccatggaacactcctgaaagaagaacaaaaaaaatcaggactgacagaacagagacattctcatatgaaagatgcaccgaattcaatgaccatcacaacttccatcatcacagaacattgacttacctcatctagggggatgagtttagggggtatgggctcgtagggctcaggatcaggctcatgaggactatcaggaacaacacaggtgagagaaaaaagaatgatagtcaagttattaattcagaccctgaaagtaatttctaacctccaccccgtaattaccccagctcatgttccctcaggagtgtccaagcactcaacatcccagggcacgaaccccactctgctcacctctccttgttcaggaagagctcctgaaggattcccttctcccgctcagcctggatatatcgctcctgactattgcttccaggggtgacaagaggtgagggcagaaccaggggccgggggcacacccagggcaccttctcctccatgttatcatggctcagacgccgcgctgtctcaaatgcatgtcggtctgacagtatctctcgcttagcggcctcaccaaagtccttgatcttattcacatttactgtcggcaggggaagaaaagcaagagggaaagtaagcacaaccaagtcctttcaaaatcccttaaacacacctattacgtaggaaatgacctcttacctcgttcagtttcatccaattcaaaatagaaatattctctcagtttgccttcctcaggccatgtcacacttttcctcttcctgcctttccgggtcagttggttaggatctccaggactctccactggcttggcatccagagctcctggctccaaagaggctggaagcagaagaggtttcagacccagatccctcctttcagaaaaccccccaaactgaaccagtttctagattacctgtatccatgagctccgggacttcaacagggggaaccggggtgcctggacggtctgcgtccattgcctcagaaggtggtgctggttctggggaagaaggtttggctgtgcttggttctgtgctcgttttcccttcaaaggggcttggctattgtgaaagaaaaggaagttaatgaactgactggaaagccaagggcaaggcaattagtccagggtcccaggcacagtcccccaacagttcctatataaaggaagactctgtctccacaatgtctcacctgcaccagtctatatccaaggcaaaacgcctcttgttgtcctccccgacaactcctagctgctgtgccctttcttctactttaccttttatactctgtcactgaaacctacttctgggagcccataccttggcagccgtaggtgacagtactttttttttcttcttaattttgatgcctggaacaggggctgaattaagagcatccagaaagcccaggccctccatagctacaaaaagaaagagcaccaaatggcatcatcagacctccttcataatcctacacctgcaaacacagtccaggcataaaatgagccagtgaagaccctgcctcaacttaggacacgataagctcaagaggaccaggaagcacatgcaggaggattcacacaggatattcttgttgttattctaggtttctcatggcaggcaagccatagctttggatgtgaattatagctcaggtagctgacgaagtgagcccttgtgaacatgacagatcaccttaccaggtgcccctgaccagtcacagaatggcacacgtccctatcttatctctaaaattactcctaagtgacccctgaaacgggagttccagaggtacaaaaagtaagggataccaagaaatcaaaggaaaatggagggaaataataaaagagaagggaaaaaacttctcgttcccagggacattcattcccataagagtttgctcctggccaggtgcggtggctcatgcctgtaatcccagcactttgggaagctgaggtgggtggatcacgaggtcaggaaatcaagaccatcctggctaacatggtgaaaccccatctctactaaaaatacaaaaaattagccgggcgtggtggcgggcacctgtagtcccagctactcgggaggctgaggcaggagaatggcgtgaacccgggaggcggagcttgcagtgagccaagaccgtgccactgcactccagcctgggtgacagagtgagactctgtctccaaaaaaaaaaaaaaaaaagtttgctcctaattcaaagtacatcttccccactttagactcacgctgtggcgggatgatcttcactttgatctctttggtggcattaggtgttgtgttgagtggcttgtatttcttctctgcagggggagtggcatctcctggagcagctacgttgctgtcagaagaggaactgtcatcaacatctccgactcaccccctcctgctcccttgtgtccacagatccaccccattcagagcctgagaatatggtccatacctctgacgtttgagggggatgggtttaaggttgtacttgtcagaaaccaccactgtgctggcattcttcttcacaggcaccaaggatggtgtctccagctctagtcctggggaaagaagcacggtgtgggcagctgaactcaaaccccagacccccgaattttcctcccgttctcacccgcaaatgttcttctagccttgtaaccaaagcttcctctgctagtcttccctcttccttacgattaacataccacacatcaaatgattcccccataaggctctgggtgtgcacatgcccatgaaccctccagaggccagccgccagtcttaccagtggaacggaacttggcatgactgggtgctgtggtgcgaagagacttgggcttctccctcttcttctctggggcctcctcagcccgggtctcagccttcacctctgtcaaaggtcgctcaggaagggtagttcgactttttccttcatctttacgtttcttcttatctttctctgttgtgaaaaaacaaagcagaaaaggattttatttagatgaacactgtcagaggtgaagcagactgggagcacctaaaggccacatcccaataggaaagaaataaatacaaaggataaaggactaaggagcttaccagcaggctgggtactgctctgagagcggatgacagccatccagtcgctgacaaggactgaggccaatttccggagctctgcaggtgacagaaaggggaaatgcctaaataatgtaaagtaacattcttccaggaacagaaaatgggaggtttgagaaaatattgtgaaaatttatgtaacggagaaagtaacccaaagttttaagaagaacatgagatatgcttaaaaaccaaacccttaaaaaatggaacaatgaattagagttgtgttctacttggataactttcaactctgatgtcatcacaccactctggagtaaaaagacctaatatttcagaatatgtggttaaaatctacattagtaaaagactacacgttgggtgcagtgtacactgcttgggtgatgagtgtaccaaaatctcagaaatcaccattaaagaacttatacatgtaaccaaaatccaccagttcctcaaaaactgacatttttttaaaaagctacgttagttgctttatgtataacacacctaattgttacaacaatctgaagactttttattttcctttatagatgtgaaaacaagaataaaatttgtttctaaatatatgaaaaaatactttgtaactctttccttttgtacttggcaaataacatctctgatctatggcacctctcttctggccaacatttccacttataaactcatttcataatttatcatttagtaataggagtttcacagatgagacacgctaggatgatactatttcccacagcaaattttaagtgtatgtgttttataacaagcaattttaggaatcagcttccagttaaagtatggcaccttatattcagcaacagagaaatgaacaactttggaattgagaacaggaaagagggtacaggttagaggaactttctctttaaaagaaggaaaaaaagcaaggtgaggtagaaagagaaaagtgaagggacaatccaaggatgggaaaagatattaaggtaattaagtggaagtaatagagaaaagcccatgagagagcaggagtggcaccctaccttcatcctcacttgacttgctcagctgcttcaccagtttagctgtgttgttctatgagagatgggagcagcagaaaggtaaatgccaggaggcaaataattccacttagagctaaaaacgacaaaagttacagtcctccctgcttttttttttttttttattttttgagacggagtctcactctgttgcccaggctagagtgcagtggcgcagtcttggctcactgcagcctcgacctcccaggctcaaatgattctcccacctgagcctcctaaataactgagactacaggcatgcaccaccacatctgggtaaattttttgtattttttgtagagacagagttttatcatttttgcccacgctggtcttgaactactgggctcaagcaatccacccacctcagcatcccaaagtgttgggattacaggtgtgagccaccacacctggctgacacattcctttttttttttttttttttgagacgaagtctcactctgtcgcccaggctggagtgcagtggtgcgatctcggctcacaataacctccacctcctgggttcaagcgattctccagcctcagcctcctgattagctgggactacaggcgcatgccaccatgcctggctaattttttgtatttttagtggagacggggtttcaccacgtcagccaggatggtctcagtctcctgacctcatgatccgcccgcctcagcctctcaaagtgctgggatcacaggcgtgagccaccgtgcccagccgccacacacctattaaaggagataaattcaaaccaagtcttcttcttctaaattcctattttttttctgctgttctacctcacaggcccaagattacagccacatcagtcagtttgagtttttcatccattagactaaaccaaaaaaggaagaatcagggtttaaagactaaaggtacctgcttgagatggtctacagtgagcggtagatgctgcagggtcagtagaatttgctggaggaggggaatgttgttggttgtctttgaatacgtcagccaattgttaagaagtttgtagccgccaacgtcaataaatctgcaggcaggcaggagagtctatcagtaatgccctttctaggttttgacagtaccacatcctacaatcccagtctcccatcaatgacccaggaaccccatgcctcaccgccccatcttttcgctacaccttcccattccaaccatccagatccccacttacttgaccaatatttctggtgaacgggtctgcaggagaatgttcaagtaagtgcatcgactcaccatctttcgtgcttccttcatcaaactgcagaagatgagttagggttagaaatgaagcagccagtatctcttctcttagcaaaagcgcctctctgtgaactgcctagagattcctaatgacttgggactttgctccagagaaggggagtcacatatacctctaggaagatgggatggatccagtgtgacatggaaacttatgggagaacagagacaccgcagtctctgacctggggaggagagcatcgctgcctccgtaacacacaggatgaattccattctgcctccaggtgataaggctatccctcaacaactgtccctaatagtctgttcaagactggcttagttatttactctcccctgaaaaacctgagaatccctgaaggaaaataacattatgggtaggtggaacacgaaccaaaacaatctagaattctgttaccaggctaccctgctctcattccaaagcatgactcccttgggaccgtggacgtccaaatctccagtttccattatggtcagaaacaagtgatcatcttttcctatcccttatcctaaaattgttacattttaatcctattgcactgactatctttccctttcctttccaggatcattccagtgtgcctcaactgcagccatgttttaacacacaatattctctactcacagtgaatacaaaaaggggtaaagactcacctgaagatcttggaaatcccatccacacttttgacttccccatctcggttaaggaagctgtccaggcccttgagaagttctttggggtctatgggacccgaacccatgatggtggtttctatggtaagaggacaaaacaaacaaacccacagaataaatgggtggcaaggactacccgagtaggccctctaataaaccacatctctatatttgacaaagtataatgactaattattcaactatgctattttttagatatgaaaaatcgacacagaccacttgccactactgagaaaatagccctggcaagttaagcatggggagcatatgtgactgaacaggaaagcaattcgattggaggagtagggcagcacacctgtccctccctcccagcagcatccttcctaggatggctgaacttcactagatcgtattaaagctaagatcagttcccataacaagatgttcaactctccagggcatttacacctatcgttaagtcctgtcttccctagttgctgataaatttggcttgaaaaacagcctatagcttgatagaaattgggccaatcttgggtgtttgagctaaatgtcttataagacttgagtcctttttatcttagcccattaagagtcataatcactacacatggcaagatatgtatcagctgaagtggtagatgatggagaacaaaacaaaacttgaaaacagaatccctccctaaggagatctgggagtaggtgccagagattgagacaaatggatgcatggaaatcaagcaggtcctcctagaccttgaatagactgtcactcattagccaaacactacacaagtttttactgtctctaagttaaaaggaagctagtggtttgtgctttcaaaagcaaagatgcgaatctggtcctctcctcaaaaatcacgctgtacaagatcccctaggaaagcctaaaactgaaaaccatggaacctaaaaagggaacagataaagccaaatgctagaaaaattcccttttaagcagctgttttagaccaggttgggaagggaattagttaaaagctaagctccttttatggaagggacaagccagaactgaagttccagaaaggtaatttaggatcaatatggttctgattgggatttttatctacactgcctctaaatacttgcttctaagacccaaaaaagaggctgggtgcagtggctcatgcctgtaatcccagcactttgggaggccaaggtgggcagattccttgagcgcaggagtttgaaaccagccttggcaacatggcgaaacctcatctctacaaaacataagtcgagtgtgatggtgtgcacctgtagtcccagctacccgggaggctgacgtgggaaaacgggaggactgcttgagcccagggatactgaggctacaatgagctgtgattgtgccactgcactccagcctgagagacagagtaagacgctgcctcaaaaacaaacaaacaaaaaaccaccaaaaaagaaagccacttcagcaatatctgcctttgggcaataaggcccacactgagtagcaaggaagaggcaagaacaaaaccttcctcatcctacatctagcacagaagtaacagacacaatcccagcagaagggtagaaaaatcagtattttacaaagatgagtagttttgtgccggaaaaaacacaggtttcttgtaagataatgcaaattagttctacttgttctcaaacaaaagaaaaaacatagcataacaatctcagcctttttgtcctcccaacaaaaacgtcagtaagtttccaaatgtgtaggtcctaacaacctaggcgagcagcagcagaagcagggaggaggcagccaggaagggtaggagtataatcttggctctggagatcataacctgtgggctgaacagagggagagatgaggcaagaaatgttgagaagtcgctgctgccctggaacctccacaaatacaagtggaacctgaggtcagagaaaaaacattcaaggagaatactggaaaagattagatgtccgtgggccaaatccactcaagtgtggtgattcctacacacacagagacagacacagaaataaaggtattcttcccatgtagtgagatactataaagtgatctatagaaactataaagagatacgataaagggacacataaaacagatatcacatctgttggagactggaaaagcaatgtatgggttccaataacaacatatcataagcaatcaagagactaagaaatttttaaaactccctctctctatatatacacacatacctaccattagattcctaaagcaaaatatatgcaatttgacaaaaggccttgaattaaacatcatttcaaaccagttacccttgactgattcaaacccagagttgaatatatataaccctggagaattcctttttgcatatccaactacaagctaagccaataaatagacctactacccctatttccttcagacactaaataaactgtcatctgagctcaagtgttccttaagaggatgggagacaagaaagaagagccagtcttagaaaaatggaccaatgagtacaaagctaaattctgtccagtgccctctgctggaaatgggatccagggacttttttattcccacatgtataaacaagaataaaagacattaatagtcaaagggaagctaagagacaaagcaaaattagcgttaaatattcattttccactacttatattttggaaatataagtgaaattttgtctcatgagcaccaatcttgataaaatgtaagtgggttttctcatgatggccttccttcaggaagattagttcttatttaaaattaaggaccccaagtgtcttataacctagtttccttgctttgaagtcagtatattttggaaaaaaaccaaacaatttccaaggcgctcaagtggaaaggaatgtaaagtccaacatttcgggcacagggctacagcagagaaggcaaactgagttgatgaaggcaggcaggggccgtgactaagtgttgtaacattacctactcaagatctggagtctagaatgaaagcttaagaaagctttctggaaccacaagtaatccacggcatgattatgtcttcttttaatgagctgctattttcttgactgcagaacatacagaaggtggggagtgaggtagcaaccccctggcctacctccacctcatcctaagctatgcgttccttatggagaatgtttcaggcagagccatactctactggcacaaggcattggggaattttctaccatttttaccagagataaacgtctgtgacaccaactcctgccttcaaaatgaattttacttgagggttattcaattaaatagggtgaaaaaatatccagcatagctaaagttattccacacccatcaccaatgaaacaggactgaattggttcaggataaaaattctgtgcaagtcagagctctttaaaaaataactgtcttctaacaaaaggagaaaaaagtcccaaatttaccttaatttagaggcacttctggaaatgaaaatgatttgtacctaaccccttatgttccccttcctttcttcagtgttttaggcacttcctagtttgacacaatagtggactgaattatgtctctcaggtgattcatcacaaggtcatagctttcttccaagtagtaagcccctacccctcagtcattttgcaaacctgatacatgagctcctcaaaagcttatctgccttccaataaagatgcaaaatgatataccaccctgactcatagaaaaagaccccagactagaactctggccacaaactacaaggatcaggttttccaagattttctgaatggatgtggttcccctagtagacctggcttcccatctcccatgttaaggaagatcttctttattaatcccctggctcactagagatcaggaaccccagtgggtagaatgttcagctcccaaggaagatatgctgcagaggcacatggcaaactgcttaaaagaaaaaaacaaaacaaaacaaaaaaagcttgtagtcaacagacatgtgaagagtccctcccatccaatccagaagcttaagtaataatttgagaatctgtacccagtaggaagttagccctaagtctcacccaggtcaccagagggcagttatactttccaattctgcctagaacctccacgcttcagtgcaggacttttaaaaattaaaattatatggagagtctgataaagatttgactttgaaaaatttgggggaagaaaggaaccagacacccaataccaccctcagatagggcatggcttctgaacatgcaccaaatgccacagcactgcatgagttgaaaaatgaagaggacatcattttttcattaatgcttttaggaatttcttttagaagggaaggaaaaagaaattcaaaaaaggtggctctttggggaaaaaaaaaaaatgaaagttgtgaaatgtaataccagaaaggttttgcttaccagaaaccgtagcttgattccccctgccttgagtttacaactgccgcctcctttcctaaagattcacttcttatcctagtaccaatgtacaggaactaatcaagtgcagaacgtgatacagcactgaatacagtttatccccaaactgagaggtgggaatgagggcgatttagaagaaagtcctgaaagtacccaccttcccccgattctcattacacaaagcgaccaaatgcaggaggcccactggttcctaagcagaaatggcacacttcagtgtcattaggcccgtttatctccaagttactcttgcaagcccttgtgtctttcccatctccctctacacacatatatacatacacacacgctcacacacatcctcaaagcttcccagtcttaggtttgcctgttttttcacccctggcagctgaagtggggaaaaattacaagcagttgtgatgagtgaaggaaagtgaaaataaaaactggttctataaaaactagaactacacagagatggacagccttgatacttaattcctataagctcctatccctttaagatattttatataatgaaaataaggaaaatgtcttctccctagcagcaacgagcacaggcagtgcaaaagcatctgctcaggggtggagcttcaagagggtggagagaggaggaagaaagctgattacatcacctttcaaggctgctcctcccacttgaccaagtttctagggcggccctaagctcaggatggcaaaagggggagaaaaacaacaaagacggagggacgccattttgtaatggagaaagaggacttaaactaaaaagccacccggctctgccggtagcttcagttacattataaaacacctttttagtaaaaaaaaaaaaaaaaaaatcaaaaaccagttccccatcgtgaataatctttgacctattttgatcagtaagagcgtagtgaaaattaaagcaattaaaatattaaaaagaacaattttctgcagggaagaactgaatttgcaacggaggttcaaccggctaccatcgaccacccccatcctccctatagagggaaagggggaggaaggacttggacccctctcaacaaatagggttgaggtgggaggacaggaaaaaaaatgggtcaagacacaacctgcaacgccgcttggaagacaaaaggacaaggaaagtcgccatattgaagcagggaagaaaaaaattccttttaacgacacaaatcttttagaaagctagcattcaattgcactaaatggcttttaaaattatactcctaaattccacatttcccaacctttccaccctctatttaactgtacctcccccaccaaaaaatatcaagttaaaatgttaatcactcttttgcttttaaatacctatgcaatctgcaacaattataagacattctttacctccccaactattatcttgtatgtactggcactaagattatattttgtcctaagtgtcttgcaatctttattcctagattgccacctattttaaccacacaaatataccccaagcaaattacattaaaattgagaggatttaacagtcatttaaaaagttatagcgagctattacttctctctgcccatctccttaccctgcaatctttatgtacagattgcttattaatctggcaaattgaaaggcaccctgcttgtctcacacacaaagaagtggtacttctgggccacaagatccaccatctcttgtatgtgagctcattaacccttttgaagactgctgctaaccagaggaaggtaaccattcctccttatataaacacatatggctttggcagtctggaaattggctggattaccaagggttaaccatcaaaatcctcacttgctggccctccctccaccctctctttgcctgcagcaaggcagggaagagataggtggtaggggagagagaacaagactgtttagacccacaggccctttttaatggagattaagtgaccagattggtccttctccagttctctatttgttctatggtctcatttcttcctctcattatttttggtttcacaacgggaaacgttgatttcttgttgcaaggctggtttttgaaaattcgacacttactatccaatttttttgcgacgtcagcacctcgggctcaggggggagggggtaaaattttggaggaaaaaaaataaaacaaccaaccaggacccaaaactcaattatttagggggcctcattggatcaaaaagtcttttaaaaaataaaggccaactcagtattcatttcccccccacccaactccatttagggaggggggtcgcagaaaaaagttctgagtggattcaaaaaagtaaacgctggatgagtgaatttgggtggtttgggaagggagggtggttgattatttttgaagttatgtagtgacggtccttcggccacagatttcaagtcccaagcagcgtgggctggtggggtgggcaagataggtgggaaggggcagaagacacaagtggttgggctggtggctgctgttttccctttcccccctctctcaggatcctttcaagggcttagatgttgctgcggcttgtttctgttttcctcgtggccggcctgtctttctccgagaaaattcaaacctgggataaaaggaacacaagggagaaagatgtaatcagtacgggttgcttcaaaacactcacaaatgccatctttgttgtccccaaacaaacctgtgtcccatcctgatcgcaaccgctttaagccgtggctctcaaatgaacccatccatccctatcccgcttcccagatccaacgctctccgcaaaattttacccactagacgacaaagtaggcaaacttacctctaaacgaaccccagaatggcggccgcccgctcgggtggagtcttttatacccggacgccgcccaacgcgcccaaacgtgctagtgaaacgcccttgtcgcgagacattatacgcgaggcgtgaactcattggtcaacccaaatgacaactcgccaactgattggctactctcacttcacctttgctccgcccctttccctggcactctcttccgcctccttcctgcctccctgtcgcgtgcgcgtgaccaggagcctagcacctccctttcctctgcttccgccacttccgccctggagaacatttctcacccaggattggtagaaacctaagagcgcatgcgcactgagaggataccgctaaaaatcgccttcaaaattgcttaaaaggcaaactttaacaatgcgatctaagagtcgtagtgactggccaaaaaaaaccgcaattttggggtctaattcgattgtgacgcagttgaaattagcttctcccccatgccttccctttcacgcttccgtcctgacgcaaacgtggggccgccttccgcactgcgggcttgtccttggccctgccctactcagtttcctgaagcatgcgcagttgcctttccgtcaattcctgtcctgggcgtacgtcaagatggcggcgtctgtattaaacaccgtgctgaggcggcttcctatgctatctctcttccgaggttctcacagagttcaggtaactcttcgaaagacattttgcacaacctcaagttggttataccttctcgaggttgtcgctccactgtcaggaatccacgagtggagaccttcccacgtgtgtcttagctgtctaggcagtacttcctgcaaccccccccccacaccccgcgcattttctaatcccgagccgaggactaaacgccagggttaggtatcatcctttttccaaaatgccatttcagtaaaataacttaagtgatggaattgacccctgtccaccctcagtcatgcataaccagctttttaaaaattatttaactaattaaggggccatgctaatctctgtatcgttgcaattttagcataacatatgtactccccaagcgagcgccacaaccagctgttaactatgcaagtggtgactaaatctgtgttgctctggaatgtccttggggaaattagggatcccaatttctaccaaccttgctatttctcaataaggtcaggatatattcttacgacctgaggacagtttctcagctctctttattaaatcagtttcttatcggagttatgagagcttaactccgtcctttgaattgaggtttccctccagtcttgtgtactcacctctctggaggttcttggtggggcacggtgagataggaaggcttgcccagctgccactccctaaagtgggactgaagagtggtgacagaggtcaacacagaaataataacagccttggtagctttaaaactagcgttaggactcaagtttgttctgccctgtagaatgttgaccttcagcttttatgaaaatgggcaactcagtgacttcattggattgatttggagactcacctgtcttctgcatcccctccccaccacacatcttagttccaagaacctagatatccttcctcttactttattcttccaccagagtcaatttatttccaaaaagcaagaataccttttatgtactagatttttttttcttttttctttacacgaaatctcactctgttgccaggttggagtgtagtggcgcaatcttggctcactgcaacctccgcctcccgggttcaagtgattctcttgcctcagcctcccgagtagctgggactacaggcgcatgccaccacgccgaactaatttttgtatttttagtagagataaggtttcaccatgttggccaggatggtctcgatgtcttgacctcatgatccgcctgcctgggcctcccaaagtgctgggattacagacgtgagccactgcgcccggccttgtactagactttttatttgtcttctgaaataagattgttttttaggcatatatcccctaacttagcttttctttcaggatccaattgtagaaaaggagagtggttgttgatttatgtcaatttaaacccaacaaaaatacttaacttacatatgcattcctgttatattccattaatgcagtatgtgtgcattcctcctttccaaagtgtgataagcaaaacaatttagtcctttccttaaactcattcttttatttttttcttctcctttgtaggttcccctccagactctttgcaccaaagctccctctgaggaagattctttgtcctcagttcccatttctccttataaggatgagccctggaaatatctggaatcagaaggtacctctaaagggggaaagggagggtcagataggatttgagataagtggacagagccacccactacactcccacccaggaataacttgtatgatctttcatttcagaataccaggagcgatatggttctcgccccgtctgggctgactaccgccgcaaccacaagggtggtgtacccccacagcggactcggaagacatgtattgtgagtttctgagagtgggatgtggagtgcggggaggccacaagtaacagtaacagcagcactttttctgacgtgtttgaacatccttaactgctgttttttttctctctacagcgtcggaataaagttgttgggaatccctgccccatctgtcgagatcacaagttgcatgttgactttagggtaaggagagtcttttctttttagggtaagaaaaataaagattaggggctgggcgcggtggctcacgcctgtaatcccagcactttgggaggccaaggcaggtggatcatgaggtcaggagatcaagaccatcctggctaacacggtgaaaccccgtctctactaaaaatacaaaaaattagccggttgtggtggcgggcgcctgtagtcccagctactcaggaggctgaggcaggagaatggcgtgaacccgggaggcagagcttgcggtgagctgagatcgcatcaccgcactctagcctgggcgacagagtgagactccgtctcaaaaaaaaaataaaataaaattaaaaaaattaaaaagaaaaataaagattaggagcccctttgcagtgccaaagagattactgtaggtgccccacacttcgtatatccaggaggccctacagtccgttttatagtaactgtttctggcattataaaaacatccctccagccttttaccttctactatggattgtactgaaagttttatcctatgcctatgaaatttacagtctaaattggcaggtaagagaaatggctgttttttttttttgagacggagtcttactctgttgccaaggctggagtgcagtggcgtgatctcagctcactgcaacctccgccttctgggttcaagcgattctcccgcctcagcctcccaagtagctgtaactacaggcttgtgccaccaagcccagctattttttgtatttttagtagagacagagtttcaccatattggccaggctggtctcaaactcctgaccttgtgacccacccgcctcggcctcccaaaatgctgggattacaggtgtgagccaccacacccagccagcgaaatggctatttctagtgggagagccaatatccaaagattcgtttgtattcattacagttattaccaaatatattggcccactttcttcctgaggttttctttatttccttgtcaatgttcagtgccatgctggcacctggggctggagggcaggtatatgaagcaagatagagtccattatttttcaaaaagccttcaatatgtgagaaggacaggatttgctccttaaagaatttgaaaacatattggctgggtgcggcggcccatgcctgtaatgctagcactttgggaggcccaggcaggtgcttcacctgaggtcaggagtttgagaccagcctggccaacgtggtgaaaccctgtctctactaaaaatacaaaaattagccaggcatggtggcaggcgcctataatcccagctacttgggaggctgaggcaggagaattgcttgaacccgggaggcggaggttgcagtgagctgagattgcaccactgcactccagcctgggcgaaagagtgaaactcctcaaagaaaaacaaaacaaaaagaatttgaaaacattatatcaataaaacagataatgggaaagtgttcttctgagcttgcagcaaaagtattagagcagaagctatatggctgatcatcagggaagtagtagagcatttggataacagtcagaaaatgggggtatttgactgcaataagaacccttctaacacaggttatttaggagtcccatagataatttcccagtttcaattgcatataattggttataaaaagagattatggccaggtgcggtggctcatgcttgtaatcccagcactttgggaggccaaggtgagtggatcacttgaggtcaggagtttgagaccagcctggccaacaaggtgaaacaccgtctctactaaaaatacaaaaaaaattagctgggtgtgatggcgggcgcctgtagtcccagcttctcaggaggctgaggcaggagaatcactggaacctgggagatggaggttacagtgaaccaagattgcaccactgcactccagcctgagcagcagagcgagactccgtctcaaaaacaaaacaaaacagagattataattaattacataactgagagagagaaatgttacaaatttagtagcatgggtgattctgcttgcattctactctacaatgtacctgcttttttttcaagagtctcatttcctagttaatttgctgagagagagttctatgtaaattgtaaaattattcttagtatataaattatattcagcatactattaaatacattagttgtttatacatacacattacaatatcattttttgggtgatttctgggatttccaatgaccagccccagtttttcacctaaaggctgacgttagaacttaacctctgcagcccaggcgcggtggctcatgcctgtaatcccagcactttctgaggccaaggtgggtgtatcaccaggtcaggagttcaaggccagcttggccaagatggtgaaaccgcatctctactaaagatacaaaataattagccaggtgtggtggcaggcgcctgtaaccccagctactcgggaggctaaggcagagaattgcttgaacctgggaggcggaggttgtggtgagctgagatcgcgccactgcactccagcctgggcaacacagggagactctgtctcaaaaaaaaaaaaaaaaaaaaaaaaagaacttaacctctgcataagagatttctatgggagcacagtgacagaatatgggatgtgcaaggatggattcagtgaattgatgaagccaaactgggacatgaaggaggatggcatctggagagctgtagaggggtgaaggtggtccatgtgggtgtgtagggattgtgtactttcgatgtccaaagatcctgctgctctccctgcctcttttcctcacgtttctctaccactttcccccacagaacgtgaagctcttggagcaatttgtctgcgcccacacgggtatcatcttctatgctccatacacaggttagcccatcatccctgcaccaccagagagcttttccttgtggcatgccttgtttatgtagttggccaataggtatttgttcagtggctcctgcttatagcctaaaaggtctggctgaaccttttggaaatcttggcttgctgggggctaaagtaattaaatgtggacaaaagaaaacaacaaatacagccaggcgtggtggctcatgcctgtaatcccagcactttgggaggccgaggcggctggatcacctgaggttgggagttcgagaccagcctgaccaacatggagaaaccctgtggtgatgcatgcctgtaatcccagctactcaggaggcggaggcaggagagtcgcttgaacccaggaggcacaggttgtggtgagccaacattgcgccattgcactccagcctgggcatcaagtgaagctccatctcaaaaaaaaaaaaggaaaaagaaaaaaacaagtacttctgtaagcaaactatctaaatgtagtttttaattgataaacagtgattaattcctttctatagggtcttttaacttttacaaaagacttctcacaaattgtcacataagttattttatatcattgtcaattggattagattttccaaacttggaatcgtaaatttaacaattcagaattatatttattccctaactacagtcacagggcaaatctggcccactgtcacgtccatttgttttcatattttctgcaattgcttccatgctacaatggcagagttgagtagctgagacagagaccacaggacctgcagagtttaaaatatttactatatgactctagacagaaaaattttgctaacccctgctctgaagcaagacaaatttgcagagaataattttttgttgttttttttttttgagacgaagtttcactcttgttgcccaggctggagtgcaatggtgcaatcttgcctcaccacaacctctgcctcccaagttcaagtgattctcctgcctcagccccctgagtagctgggattgcaggcacatgccaccatgtccggcaaatagagatggggtttctccatgttggtcaggctggtctcgaactccggatctcaggtgatccagctgccttggccttccaaagtgctgggatgacaggcatgagccaccgtgcccggcagagactaatctttgtttttgttttttttgggggggtgtgggtggggggatgaaatctcatttactctgtcacccaaggctggagtgcagtggcatgatcttggctcactgccgtctccacctcctgggttcaagcagttctcctgcctcagcctcccaagtagctgggattacaggcacgtgccactgtgcctggctaattttttttgtatttttagtagagacagggtttcaccattttggccagtctggtcttgaactcctgacctcaagtgatcctcccacctaagcctcccaaaatgctgggattataggcatgagccaccgtgcctggccttgcagagaataatctgaattcaccattgttgtgggtggcagtacaatcagtgttcagtttgtcaagagtttcttatagtcaagctgtaaaggctgaagggactattattgttactctctcagattgccttccccaactctgaaatctcttttccctttattgaatctttgtggattgttcaactcaaccctctaattaaccacacttgcccattaaattgtgttctccctgtcttggaggttttaccattaaatggcttctctatagtggctagaccctcctaaatctttatcccagctctccaaaagatgggggagattctttcctttgggcagatggggaaactgaggtccatggaggggtcaggggaaaggggtcattaggtaaagccaatccttcccaatctacccctctgtcaccatatggaagcagttgtgttctattatttactgtgccttaaagaacaagatatttttctccccacaggagtctgtgtgaagcagcacaagcggttgacccaggccatccagaaagccagggatcatggtgagcatgagacggggcacacagcagttttgtttaggtataaggaagatgacttagggctagaaaatggatataaatgctcacacctgttcaagatggtagcacccagcatgttcttcctgacgttacattgtcccctgtcctttctcctgagtgtcttactttatcattgtcctgtctccttgttctttgtctttccatccttttccctcctattttacaactgctggtctcaatgccttaggaagttctttatataaatgtctggccctggactacatggcactgctgcataagttagtaaaaagtatacccctctgctagggcagatgcagcttcatagtccttgttcagcactgcacagctttgtaagcaagagccccagcagtatgtcagcccacacttgccctctgggccggtcacctgtttgcagtatacaacatgcataaatgtacctggtggctctgactggtccttccctttataatcctttttcttacttcatctaaaccaccctcctcattgcctcttaaatttcttttcttttttaatcccttaggtctcctcatttaccacatcccccaggttgaaccacgggaccttgacttcagtacctctcatggggctgtgagtgctactccgccagcccccaccctggtctcaggtgacccctggtacccatggtacaactggaaacagccaccggagagagaactgtctcgccttcgccggctttaccagggtcatctccaagaagagagtggccccccacctgagtcaatgcccaagatgccccctagaacaccagcggaagcctcctccactgggcagacaggccctcagagtgctctgtaggagctgtagactgggaagagaggccaggcgtggtggctcactcctgtaatcccagcactttgggaagccaaggtgggctgatcacttgatcccaggagtttgagaccagcctgggcaccatggtgaaacctcgtctttaccaaaaaatacaaaaattagctgggtgtggtggtgcacacctgtagtctcaactattggggaggctaaggtaggatcacttgatcccaggaggcggaggttgcagtgagttgcagtcacacccctgcactccagcctgggtgacagctagaccctgtctcaaaaaaaaaaaaaaagactgggaagagagctagagggactaggagataatgtgtatgtaggtttatgtgatgggatatcaccctgaagagttgtgtcttttgtggccagtgacaaatccaggaaatgaatgttgctgatagggataaatcttgaggctgagggcgggtggtacagatgtgtatgggaaaccccaacccctatatattgtaaatagatgggctgggctaaacattgttgccgtttcatacttctaccaactcagcttttacacaataaagctctactgtctctggtttgctttgggctgtttccgatgaatgccattagcggggggtgggctgagtgatggtcttttcatataagcaattgggtgatgctgtggggagataagtggtcaggcttaagccagccttgcctgtgacgcctgggactagaagccggggatgggcagctgtgccactctgtcaagatgccttgtgggcccccactccacagcatggcccactgttcactgaggggttaaaaggttggacagtgagacactgggccaaggaagactacgttgccatggcactcactgccgtgggatgcagggatggaaaggagtggcactgctaggggcacagctggtttggcaagaaaaacgggggccctgtcagttgccaggacgctagggggcaaggtctacaggcggggctcctggaaataaagactccgagaggcggtgcggcgagaggaggggcggaagtgacgtcgtgtggggcgggtccgaccgcgcacaatgggccatggagttcccgttcgatgtggacgcgctgttcccggagcggatcacggtgctggaccagcacctgaggcccccagcccgccgacccggaaccacaacgccggcccggtgacagctcaaacccaccctctggcccttttctcccggttcctctccaaacctggtccaggcaccacgcccccttctcactgactagtgatcgccccttttgatgtccaggcctgcctttttggtgacctctgaccctgggcctagtgggattgatcagcgcttggatctgtgacctttcaccccgggcccaaaatgtcccaatcaaaggatgtggttgacctggcctttctgcttcctcacaataaccttaagggaggagggagtgtgccaccttgaaaggtgtgacagaagtttgggtttcagaagggtggggtgggaaatcagattggaagactcccaggcaaaggcagggagccttcagtgttaaacctgggttggagttgtggcccaggttcccaggactgactgcctaggacccgctaatttagtgagtatctgactctttatttcttctctttctctagtgttgatctacagcagcaaattatgaccattatagatgaactgggcaaggcttctgccaaggtactggagagtttttagatggagtaaagggaggacctctgtggggatggtatataagggaggcctgggtccttcggagagacttgcagaaagtctgacttaatcttccctgcaggcccagaatctttccgctcctatcactagtgcatcaaggatgcagagtaaccgccatgttgtttatattctcaaagacagttcagcccgaccgtgagtgccacatgctcttccatcccatacttaattccttccttcctcagcccttcccccatctttgactatctcttgcagatagataccactagcctgttcattattttccccgtcctacagggctggaaaaggagccattattggtttcatcaaagttggatacaagaagctctttgtactggtgagtgttattggatgctaggagttcgtataccttggtttctgagaacaaaagtgctggaggttagggggcagcagagatgccggggttcctaaaacatttttattgtttctctcttaggatgatcgtgaggctcataatgaggtagaaccactttgcatcctggacttttacatccatgagtctgtgcaacgccatggccatgggcgagaactcttccagtatatgttgcaggtatcactgacctcttcactggttcatccaaactaggggctcctttgccctgagcccttccagaagccctgcctcccaccccccatgttcccatgtcattctattcccttcccaggcttctggcttcctgttggcatgctttccccatacttcctcctaccctgagtctccttttccctgcagaaggagcgagtggaaccgcaccaactggcaattgaccgaccctcacagaagctgctgaaattcctgaataagcactacaatctggagaccacagtcccacaggttagaggtttcagagaatagatccccactgagcattcccattgaatttatttgttatttatggcaaagaagtagtgacttatttcctatcacataggtttcattttctacaaccaggctctttctttctcttgtggtaccatctctcatcctgtagtgacttctttctcatctattttgatttttttttttgagatggagtctcgccatgctgcccaggctggagtacagtggcgcaatctcagctcactgcaacctccacttcctggtttcaagcgattctcctgcttcagcctcctgagtagctgggactacaggcacccaccaccacacccagctaatttttatatctttagtggagacggagttacaccatactggccaggctggtctcaaactcctgaccttgtgatctgcccgccttggcctcccaaaatgctgggattacaggtgtgagccaccgcatctgactttttttttttttttttcaaagcagagtctcctgctgttgcccaagctggagtgctatggcaggatcttggctcactgcagcccaaccttctgggctcaagcgatactcctcccttagcctcctgagtagctgagactacaggcatgcaccaccatgcctggctaattttttattttttgtagagatgaggtctcactatgttgcactgggtggtcttgaactcctggctcaagagatccacctgcctcagcctcccaaagtgctgggattataggcgtgagccactgtacccagacttattttgattctttaccacaagttgtttcctacacctaatttttcttttttttttttttttgtgagatgtagccttgctccatcgtccaggctggattgcagtggcacgatcacagctcactgtaacctctgcctccggggttcaagtgattcttgtgcctcagcctcctgagtagtagggattacaggcatgcaccatcatgcccagctaatttttgtatttttagtagagatggagtttcaccatgttggacagactggtcctgaactcatggcctcaagtgatgtgcccacctcagcctcccaaaagtgctgggattacaggtgtgagccaccgcacacaacccttatgcctaatttttttttgagacagagtcgctctgtcacccaggctggagtgcagtggcacgatctcagctcactgcaagctccgcctcccaggttcacggcattctcctgcctcagcctcccgagtagctgggactacaggtgcccaccaccatacccagctaattttttgtatttttagtagagatggggtttcaccgtgttagccaggatggtctagatctcctgaccttgtgatctgcccgcctcggcctcccaaagtgctgggattacaggcgtgagccaccgtgcccgaccccttatgactaattttcaacccaaacatagccagctcattttcacctccttgttttcacatagttcattactcatctggtcagtcagtatttattaagggtccagaataatatgcattccctgtcctcatggagctttggcctaatatagggaaggaagtcttgtttataactaagtgcagcaaaatgttactaatgctacccattcatccaataaacattgagtgcctggcagtgttctgggcactaggaatggtttactcaatgaaacagacaacagcctgggcaacatagcgaaactctgtctctacaaaaaatacaaaaaaaaattagccaggcgtggtggcacgagcctgtagtcccagctacttgggaggctgaaatgggagaatcgcttgagcctgggaggcagaggttgcagtgagccaagatcgcgccactgcattatagcctgggcaacagagagagaccctgtctccaaaaatgaaaacaaaaacagaaaaaaaggccaggtgcggtgcggtggcccatgcccgtaatcccagcactttgggaggctgacgtgggcgaatcacttgaggtcaggagtttgagaccagcctggtcaacatggtaaaaccccgtctctattaaaaatacaaaaattagcggggcatgatggtgggtacctgtaatcccagctacccaggaggctgaggcaggagaatcacttgaacccgggaggcagaggttgcagtgaaccaagattgcaccactgcactccagcctgagcgacagagtgaggactccatctcaaaaaagaaaaagaaaaagggccaggcatggtggctcatgcctgtaatccccacactttgggaggccaaggcaggaggatcacctgatatcaggagttcgagatcagcatgtggaacatagtgaaaccctgtctctactaaaaatataaaaattaactgggcatgatggcgtgcgcctgtaatcccagctactcgggaggctgaggcaggagaattgcttgaaccccggaggcagaggttacagtgagccgaggtcctgctacagcactccaccctgggggacgaagcgagactcttgtctcagaacaaaaaaaaaaaaacagaaaaagaagggaacagacaaaagtccctgtcttagtggtggagcttatattctagctggagagacaaacaaacataataaacaatatggttaataagtgctctggaaaaatgagagcaagtaagggtttgggagtactcaagtaaggtggggatgggagtatgtgggattgcaggttgaaaggggatcatcactgagaaagtgtcatttgagcaataactgaaaggaagtaagagtaaaaactggccgggcacggtggctcatgcctgtaatcccagcactttgggaggccgaggcgcgcggatcacgaggtcaggagatctagaccatcctggctaacatggtgaaaccctgtctccactaaaaaaaatacaaaaaaattagctgggtgcctgtagtcccagctactcgggaggctgaggcaggagaatggcgtgaacccgggaggcagagcttgcagtgagccgagatcgcgccactgcactccagcctgggtgacagagcgagactccatctcaaaaaaaaagaataaaaaccaaggctgggcgtggtgacttacatctgcaatcctagtacttagggaggccgaggtgggtggatcacttgagcccaggagttcgagactagcctaggcaacatggtgaaaccccatctctacaaaaaacacaaaaattagccaggtgtagtggcacgcacctgtggtcccagctacttgggggtctgaggcaggaggattgcttaagcccaggaggtcgaagctgcagtgagccgagatggtaccactgcactgcagcctgggtaacaacgtgagactgtctcaaaacaaacaaacaaaaaaaaagagtaagagccaagaaatatctggagagagagcatcccagacagaaggtaccaccagtgtatggccgtgaggtgggagtgtgcctgaaagagcaaattggctgtgtccagagcagcatgagtcagcggaggagtatggtaggagatgagaccagagaggtaatgcggaggaggggccttataggctactgcaaagactggcttttattttaagtaaaaaataagatcaggccaggggtggcgactcacacctgtaatcccagcactttgggaggccgaggtaggtggatcacctgaggtctctactgaaaataccaaaattagctgggtgtgatggcaggtgcctgtaatcccagctgtttgggagtctgaggcaggagaatcactagaaccgggaggcggaggttgcagtgagccgctgaaattgtaccactgcactcctgcctgggcgacagagcaagactccttcttaaaaaaaaaaaaaaaaaaaaatagcgccaggtgtggtatctcattcctgtaatcccagcattttgggaggcccaggcaggtggatcacaaggtcaggagttcgagaccagcctggccatatggtgaaaccccatctctactaaaaatacaaaaattagccgggtgtggtggcgggcacctgtagccccagctacttgggaggctgagatagaagaatcgcttgaacctgggaggcagaggttgcagtgagctgagatcgcactactgcactccagcctggataacagaacgagactccatcaaagaaaaaagaaaaagatcattttggctgtgatcttgattttttcctttttaacaagatcactttggctgttaagaacaggcaatagccgggcacagtggctcacacctgtaatcctagcactttgggaggccgaggcaggtggattgcctgaggacttcaagaccagtctggctaacatggtgaaaccccatctctactaaaaatagaaaaaaaaattagccaggtgtggtggtgctcgcctgtaatcccagctactcgggagactgaggcaggggaattgcttgaatcagggaggtagaggttgcagtgagctgagattgtgccactgcactgcactctagcctggtgacagagtaagaccccatatcaaaaaaaaaaaaaaaatggaaacggcaataagggagccagagtagaagcaagtagactaattaggcagcaacaatcctggcgaaaaatggtggtggctcagaccaaggtggtagcagtagtgatggtaaagagtggtcaaattttaaatattttgaaggtaaagcaagtaagatttcctgacagattgtatgtggagaaagaggactttaggacaatgccaaagcctgagcagctggaagaatgaagttgctttaactgagatggtaggtagaccagctttgggggaaatactaggagtacatttttaatatgttaattggagatgtctgtgatatgtccaggtttgagtagacagttggatacttccctggagatcagggaggaggtttggggaggagagttttcagcatacatctggtatctaaagccaacagacaggatgcgatcaccatagaaagattatagatagagaagctgcccctttgggccctctttaagaagtgaggacccccaactggctgctctgaaaagccatctttgcattgttcctggttcggtgtcctgctcaccacagccacctccgccatgcacttcctctgctgcctcagagtctggcagcttaatcgacatagtccccaaactctcactttcttcttaatcccttgcatcggatcaccgctgtgccccaccatgtcagaggcagttgtggacacaagctccgtgatcaccaccaaggacttcaaggagaagttgtggaggaggcagaaagtggaagagacgcccatgctaacgggaacgctaatgaggaaaatggggagcaggaggctgacaacgaggtagatgaagaagaggaacagggtggggagaaagaggagaaggaagaggaaggtgatggtgaagaaaagaacggagatgaaaacgaagcagctgaggcggtatggacaaatgggcagctgatgatgatgaagatgacgatgttgataccaagcagcagaaggccagtgaggatgattagacagcaaaaaaagaaaagttaaactttaaattaaggccaccgtgacctattcaccctccacttcccatctcagaatctaaacatggtcgccctcgagaggcctgcttgccctccacagacagtgccactgcagatgacaggcactcaccaccacccaacccaaaccagagaatttgcaacagaggaggaaaaaagaaccaaaacttccaaggtcttgctcttttaaaagtactttaaaaaggaagtttgtttgtattttttatttacattttatatttttgtacatattgttagggtcattttttttttctttgagacggagtctagctctgtcgccaggctcaagtgcagtggtgcgatcttggctcaccgcaagctccacctcctgggttcaagtgattctcctgcctcagcctcctgagtagctgggattacaggcgcccgccaccacacccagctaatttttgtatttttagcagagacaggctttcaccaggttggccaggatggtttctatctcctgaccttgtgatccacctacctcggcctcccaaagtgctcgaattacaggcgtgagccaccggcgcccagccaggttcagtcatttttaatgatctcagatgaccaagccagcctttggagggttctctgtcttacttctgactttacttgtggtgtgatcatattcattataatctcaaaggaggaaaaaaaaaaaaaaaaaaaccttgtttaaaaaaaaaaaaaaagcctgggcgcggtggctcgcgcctgtaatcccagcactttgggaggccgaggtgggtggatcacgaggtcagaagatcgagaccatcctggctaacatggtgaaaccccctgtctactaaaaatacaaaaaattagccaggcgtggtggcgggagcctgtagtcccagctacttgggaggctgaggcaggagaatggcgtgaacccgggaggcagagcttgcagtgagccaagattgtgccactgcactccagcctgggcaacagagcgagactacatctcaaaaacaacaacaacaacaaaaagtctcgttctgagcattccagtagcttctttagtgtatgtagttagttgtaccataagtagttggtttgtgtgagatggttaaaaaggccaaagataaaatgtttcatttatttgccttttttgtctatgaaatggctgcttatttatttaggcctatttgatgtatgtgtgaaacaatattgtgcaacaataaacccaaattttattttgctgagttgttctaacagcaacaaaaagaagttaaggaagagaagaagaccagcaaatgcaaccacagagtgactagtgaagtagatgaaaactgaggccgggtgtggtggctcacacctgtaatcccagcactttgggaggccgagtcgggtggatcacctgaggtcaggagttcaagaccaacatggtgaaaccccatctctacaaaaaatacaaaattagccaggcgaggtggctcatgcctgtaatcccagctacttgggaggctgaggcaggacaatcacttgaatctgggaggtggaggttgcagtaagccgagatcatgccattgcactccagcctgggcaacaaagcgaaactccatctcaaaaaaaaaaaaaaagaaaagaaaactgaaaagtaaggtgacctcaaaggccactgaagaaagtgtttccaggaggaaggaatggtttacttggtcaaatgctgctgatcaaggagcaaagaggtctgagaagttaccattggatttatctgcgttaggccattggtgatcttaatgagcagttttggtgcagcggtgtttggaagcctggatgcagtgggtcttgtagactgagaagctaggaacacagcaagaataagctactcttttaaatcctgctttaatgggaatagaaatagagcaagagctggagagtgaagtggatcaaaagagttgatcttttgcagatgggagaacaaatagcattagaatgattcagtagagagaaaatattattatgtcagagaaagtggggagaactgttgaagtgatgtcattgaatgggcggcgggggcgttgagatttggttgacaagttagccttggataggaacatggacagttaatccattgtaacatgatttgatagatgtgattacagaggaggcataaggacatggatttgagtgctatcttgggctgggggttgggtaaagaaagatgacatgtctaatcttgaaaggcaagtgtttgtcaggtggacaaaaggctaaagtgcatttcatgtagaggaacaggcatgagcaaaggcagaaaggtattaaaccacctttcaggccaggcgtggtggctcacacctgtaatcccagcactttgggaggccaaggtaggcggatcacaaggtcaggagatcgagaccatcctggctaacacggtaaaaccccgtctctactaaaaatacaaaaaaaattagctgggcgtggtggcaggcgcctgtagtcccagctaatcaggaggctgaggcaggagaatggcgtgaacccaggaggcggagcttgcagtgagcccagatcatgccactgcactccagcctgggcgacagagcaagacactgtctcaaaaaaaataaataaataaataaaaataaaccacctttcaggacactacaagcagtgtggtgtggttggagtgctgggcatgtgcttgttggggggtgggggtgatgaggatgggctggtagacattacaacaaggtcaaggcaagggataggcagggtcttcctacagtatatttttccattaagaggcaacagagagcagtggaaggagcacagtttttttttgtttgtttgtttgtattttgagatggagtctcagtctgtcgcccaggctggagtgcagtggcacaatctcagctcactggaacctctgcctcctgagtccaagcaattctcttgcctcagcctcctgagtagctgggattagaggcgcccaccaccacacctggctaatttttgtgttgatgaggtttcaccatgttggccagacgtctcgaacttctgacctcaagtgatccgcccacctcggtctcccaaagtgctacgattacagccgtgagccaccatacccggtcctggagcacagtattcgatatgaaacacattacccagttaacatgtaaggccagagcagtatagagtgtaaataataattcacatttcatgggctctatgtggtatctatatgcatcatctcagtggattcttgcacatctttttgaggtaggtactattattaaacctattttgggtttatacaaattaatgacttaaccaaattcacacagccagtaaatagtagagtccacatttgaacccatagccatttgcacccagtgaactttttttttttttttctttttgaggcaaggtcttgctctgttgcctaggctggagtgcagtggcacgatcacggctcactgcagtctctacctcctaggctcaagagatcttccctaccagcctggccaacatggcgaaaccccatctctattaaaaatacaaaaataagccgggcgtggtggcatgtgcctgtaatcccagctactcaggaggctgagacaggagaagagcttgaacctgggaggtggaagttgcagggagccgagatgacaccattgcactccagcatgggcaacagagtgagattccatgttaaaaaaaaaaaaaggccggacgcattggctcgcgcctgtaaccccagcactttggaaggccaaggcgggcggatcacgaggtcaagagatcaagaccatcctggccaacatggtgaaaccctgtctctactgaaaatacaaaaattagctgggcatggtggcgcatgcctgtagtcccagctgctccggaggctgaggcaggagaatcgcttgaactcaggaggtggaggttgcagtgagctgagatcttgccactgaagtccagcctggcaacagagcgagactccatctcaaaaaagatcttcccacctcaacctcccaagtagttgggactacaggcgcccaccactatggctggctgattttttgtatttttagtagagacggggtttcaccgtgttagccagggtggtctcgatctcctgacctcgtgatcggcccgcctcggcctcccaaagtgctgggattacaggcttgagccactgggcccggcccacgcctggctaatttttaaaaatatttttgtagagatgaggtcttgctatattgcccaggctggtcttgaactcctgggctcaagctatccacatgagccaccatgcccagcccccattaaacttttttttttgagatggagtctcactctgtcacccaggctgaagtacagtggtgcaatctcagctcactacagcctctccctcctggggtcaatggattctcctgcctcagcctcctgagtagctaggattacaggcgcacgtcaccacacccagctaatttttgtatttttagtagagacagggtctcgaactcctgacctcaagtgatccacccgccttggcctcccaaattgttgggattacaggcgtgatccaccacgcctggcccccgagttttttttttttttttgagacggagtctctctctgtcgcccaggctggagtgcagtgttgccatctcggctcactgcaagctctcctcttgagtaaactcttaatggctacactattttcctggctaaaacactgcagctggaatcagaagtctgaaagttgaggcccagccctgccacttgtagctacttggcattggccaagcgaagccatgtctccaaggctgtatttcccccaaccttctttcaaatagtgacttccaggattgtgaaggccaaattaaatgtgaaaatataatgaagtaactctaaaattaatagttactagttatcaaagtagcatcctggcctccagcatgtcttcccctgactttccccaccccttggaaccctgctgaattttttatttatttatttatcctttgagacggagtctcattctcttgcccaggctggagtgcagtggcacgatctcggctcactgcaacctccgcctcctgggttcaagcgactctcctgcctcagcctcccaagtagctaggattacaggtgcacactgccatgcctggctaattttttgtatttataatagacacagggtttcaccatcttggccagaccggtcttgaactcctgacctcaagtgatgcctgccacagcctcccaaagtgctgggattacaggtgtgagccactgaacctggactttagcacctttttatgtgcttattggccatttgtgtatcttctttagagaaaagtttatacaagtcctttgtctgttcttaaattgtgttcttttttgttctgagagtttttcatatattctagatagaacgcacttatcagatgtatgacttgcaaacattttctcccattctgtagattgtcttttcactttctttctttttttttttttttgagacggagtcttgctccatcgcccaggctggagtgcagtggcacgatctcagctcactgcaagctctgcctcccgggttcacgccattctgctgcctcagcctcccgagtagctgggactacaggcgcccgccaccacgtccggctaatttttttgtatttttagtagagatggggtttcaccatgttagccaggatggtctcgatctcctgacctcatgatccgcccgcctcggcctcccaaagtgctgggattacaggcgtgagccaccgcacctgacctttactgtaccttttctgtgttgaggtatgtttagatacatcagctgaaccattatgttagaattgcctacagctggctgagcatggtggctcacgtctataatcccaggacttttggaggctgaggcagaaggatcacatgagccctggagtttgagactggcctgggcatcatagtgagacccccatctctacaaaaagttaaaaaaaaattagtagccagatgtggtggcatgcacctgtggtcctagctacttgggaggctgaggtgggaggatcatttaagcccaggttgatgctgcagtgagctgtgatggcaccactgcactccagcctaggcaacagagcgagactctgcctctcaaaaaaaaaaaaaaaattgcctacagcattcagtacagtaacatgctgtacaggtttgtagcctaggagcaataggctgtatgatatagtctgggtgtgttgtaggctatagtgtctaggtttgtgtaagtacactctgtgatgttcacacaatgaaatcacccaatgacgtatttctcagaatgtatccccatcgttaagtgatgcatgattgtattttgtttgtttcatcttccaggtgaacaactttgtgatctttgaaggcttctttgcccatcaacatcgtaagtttttgcattttgttggtcacgtagtcggggtgagggaaaggaaagagctggactcttggtcctgccggcccctcactgaggggccccgccgcttccttcctcacagggccccctgctccctctctgagggcaactcgacactctcgtgctgctgcagtcgatcccacgcccgctggtaaagcctgtattgaaggggtggaactgtagtgcagtgatggctacttactctagatgccacggggtacagtgccatctgtgggcaattttggaaaattctaaagcaacccaagtctccagcagtcatgactgtttgcctttgccctcatgggagctcagtgcattttatatttggcaagacttttaactaagcaagctcattgggagcctgtttgacagctgatatcaatggaccctcttgccagttcaggtccgtcaacataggccagagtcaggctcctttgtaaaccccaggcttctgttagccagtgagggacaggctggtgcaaacagcccttccatttgcagtcacagaatagtgacacaaatggcccaaaatttaaatgttacttttagaagataacactcagagtttataacatttccaaccagataatgaaattgatatggagaaaccaaacctcagaggcactaaaatgctgtccagattccccatcccatatacacacacacacacacacacacacacacacacaaacacacttactgacagtctgagccccactccttcctcttcctcaccacctccaccttaccaacttctgacagctgtacagtgcttgcttgcacagaagagcccccttcctgagctggctctgtggccaggaaaggatgtaaccaccatccaaacagcagtctgtaaccagctatgagcatcacagtgtcaggcactgagaggcacctcaactcgctttggtttccaaggcttctcccatttagcttgttcagaaccacaggctgtgagagggactgagggccaacaaggatggtgaggtctcaggcctgcaggggagggtgctgtggataaagcttaagtgaatttgctgagaagtctttcatttgccacacatacatgatggagaatctcttgagagggaaagccgggagcaagtagagaagtgaggagggggaggctgaactttggacattacatcagcctcctgcttactctgatagctccctttcagatgcccatatttattttctttttttttttttaacctaataaaacttcagtctcttcccattttcgtataggaaggagagattgtgccctccttccaaacctcccctgacctctccagagcaattcctgattaaccaagggctttgtccatctcatccagaggaacccagggtcctcgttggcccggctgggaccattccactgccccagaataccagggggccgtgacagcacccactgacagtaagagctcactccccttggctgcccttctcctgcatctcccaggcccccagagtctccccttcgatctttctccctagctctgtgtttggcctactccttctggctttcctcaacagtgttccacattcccctcaaattcccttttggtgtgctggcattgccatggtgctgctcctgcaagttctcaggaggaactgtggtgtcagggagcagaggtttggggttggggtatagtggctgggaggaggggtgcaaagtatgtctcctaacgcttaccctgcctatgtcccctccactgccagctccagcaaggaagctgccacccaagagagcagagggagacatcaagccatactcctctagtgaccgagaatgtaagaggggcaagggtggggtgtctgggcctggggtaccttaacacaagggaagagaatgctcaggggacccagggaaaggattcgttctctctaaagactcagatttcttgggctgggcatggtggctcatgcctgtaatcccagcactttgagaggctaaggcaggcagatcgcctgagtccaggggttcaagaccagcctggccaacatggtgaaaccccgtctctactaaaaatacaaaaattagctgggcacggtggcacgtgcctgtaatcccagctacttgggaggctgaggcaggagaatggcttgaacccaggaggcggaagttgcagtgagccaagatcgtgccactgcactccagcttgggtgacagagtgagactccgtctcaaaaaagaaaaaaaaaaaaaagaaagactcagatttctctttttttctaccaaaacctttgctgtcatgactctcttccgtttttcttctttttctgtcttgctcttcattctccctgtccccagttctgaaggtagctgtggagcctccttggcccctaaacagggcccctcgccgcgccacacctccagcccacccacccccccgctccagcagcctgggaaactcaccagaacgaggtcccctccgcccctttgtgccagagcaggagctgctgcgttccttgcgcctctgccccccacaccctaccgcccgccttctgttggctgctgaccctgggggcagcccagctcaacgtcgtcgcaccaggtaataggagttgaagggctaaggagcctcacagctataaaagaggatgttagaaatggcaaagggcaatttgaatccatcagagagatggatcaataagatgggtggcttggggggggtcctgaaacctttcaagaaaaatatttgtgcaagtgatctgggaaaaaaatgcagtgaaggagcagaataggaccttatatggagcctagggaccctggctttaatgtgagagttatgtggaatggtaggaagaacaccgagatccatcaagttgggggaacagagccttctaagattgggaaaatcttcgcttaatacttgctggggaaggggcagtgtctgacagagagtgggaagccactggcttgtgtgccaagagtccatcgcagcaggcagggagtgggcatttcctttatttctctccctttctcttcacctctgacttctctgtttttctctcccccgccccccgccatttcccatctcccttcctcccatccataacatccttccacagctcccttccccgctctgaggagagtcgatactaacagctaccctctccctgccctgggagacctggggtgggcagggaacccctccctgagaacctcagacccactcttccattgcatcctgtaggacccagtggaacctgacagagcccataggattccctcttctactttcttagacagcagggatgtcagggtctcaaactgcctaacactttgtagcttttcttaacacaaaagcaccccttctctcctaacttgggctctgaatactttcccaacaggaagtctgatctgttgccagacttcttagttagatggctcatacatttatctagagaagcacactcttgcttgctgtcaaactttagaacaccatggaaggtctaagggcatcctgtgccagggaaactttttaaggaattttatctatgggataaaccccatattccctctagtgtctactggtggctctaatactgctttgtgctgcctgccacacttgccctttgagcctgcgaatggccgctagtgagcaagctctgcttcagagcagtctagttaggtagaacagggacttaccagcttcccaaagggatctactcaccattgccaaactcttcatttccacattttgtgtaggtgtcagggaaccccaaactggtgttgctttggggtctctaaaggagattggctgacaccaccatttcccccagatccagattctctgagggaggttgtttcttgagagtagatccagagtgtcaaggatctgttagatcctggaatcccttcttgcatccatccctccctggtagctaggtcccgatatactcctgtcttgtgagattgtcgagatgagatgggggaccactcttcctctgtccttcctctctcctttcctccatagcaaggacgaccttccctgctccatgcccagagtatagctagatcccttcccctccctaccctctgaatgtgtgctagatcaggtgccccactgtgtttcctgaaatccttgggagccggatctccccatctcccctactcactcttcccttttcttctctcagtgttgtctgaataaagtgtgaaatcttttgtgttttctaaattgacattttcaatgaaaaaaagaatcacaaaaaaaaaagttgtcagcctcatttgtgcgtcatcccttattttcctaggatctcaggacctctgtccctctcatttctcacttctgagatctgcacatcttttacccaggagcctcagagctcctgagtctggtgtctgcctatccccatcttcactgttagtcctcctgcagattctgtgtctcctttcatgtaggtgctggatccctgtgtgtgggcttccgtatctactccctcattccctccaggaacctccagctctccccagtgacttctaccctttactctgggcgtgcctttgccaagatgtcaaagcttaccaacatctctggatccactaattacctcctgcctcctgtattcgtcttcccactctgattacctgacgtctgctccactaaaccgctggatctctctcaagacaaacccttacctccattgagagtgcaacacagtctgtcaccctatttacagaggcccccttccttttcctcctaaattcaaaattcagccttgtcacttcctatttccctctggtctaaggaatctttttttttttttttgagatggagtcttgctctgtcgccaggctggagtgcagtggcacaatctcagctcactgcaacctccgcctcctgggttcaagcgattctcctgccttagcctcccaagtagctgggattacagaagtgcaccaccgtgcccagctagtttgtgtatttttagtagagacggggtttcaccatgttggccaggttggtctcgatctcctgatcacgtgatctgcccgtcttggcctcccaaagtgctgggattacaagcctgagccaccgcgcccagcctggtctaaggaatcttatagttaaggtaaccctgttttccaaaccaaacaccagagtacccgatccaacacatttttgaccacatgtgagtctgttcttctgacatgatttggatcacacctagccatagatttaacacattacctcaactagaaagaatagagcaataaatcagaagcactccagaaaatcttgggtataaaatgaacttcccccgcccttttctggggcacagctttgattaaaacctgttaggaatgataattacccccttctctttgttcctgtgctattccttttactcctctcctctgattcctccatacccacccatctttcatccagtagcctcctccccatcatctcccatttcttctacagggggactcccccaggtctggtagcccaaagctgctgctacagccgccatgggggggtgaattcctcatcccccaatacaggtaagtattcactcctccctaccctcaaatcaagtaggccacattcactgtctactcctgccttcccattcacatgcctgatatttccacaggcaaccaagactccaagcagggagaacaggaaacaaagaataggtgaggtctaaacccctcccctaacagcctcccaccaccatctgactcccttcctaacatcattctcagtcacttcctactcttaaatcttatcgtatgaactggacaccagctcctcccacaattccttctaccttacatcctgcaagcccctttcccccacaggttcaactctggtacttccctttggaatacggattctctgagaggttttaaatttggacatagcactaatggttccagcttcatacccatcatgtgtcctacattaaaacctggcccgagaccttgaagagtctgtaatcttaatttcctctttagtattcctataacccactctccatctccccacctaccaggtctgccagtgaggagcaggccttgtcacaggatgggtctggggagaagcccatgcacacagctcctccacaggccccggccccgccagcccagtcctggacagtgggtggggacatactcaacgccaggttcattcgaaacctgcaggaacgtcgcagcaccaggccttggtgaccgcagccccgtcaaacatcttcaaagtattatttctccctcactacaggaaagagccaaagcccaaccctcataatagatggatacattcattcattcattcattcagcaggcttatcagattcaagtcatttgtatcttttaaccagaccaataaaagtatttatttttatcacaagagctgttgaaaaatttgactcattatttcagccgcctcacccctcactgtcgttgcacccattcagccttcagccctgtttttgctcagctttttgctcaaaggcctcagctgtgaatacagcgcttgggggggcaggggaggctgtaacttgcgcaagcgcactcaggcagtctccgagcccgcgggcgcaggcgcgcttacagccgacagagcgcttcagccgcttccctcgagcctgcagtgcgcaagcgcgggacatctccgtttccctccctcagccccttccccccctaccccctcgccccggcctcctttccccttcacgaagccggctctggggcgcgctcacccctgtgaggaggccggaggtcggactcaggaggctccttctccactcccggaagatcatgtaccagcccagccggggtgcggcccggcgtctcggcccttgcctgcgcgcctaccaggctcgaccccaggtgagcggaggagaagagggagggaggagagggggcggggagagaccctcctcaaagccggtgcgtggggcggagcgcgcgctgggttccgcgcaggcgcagagacacccgccgccccttcccacctgtgccctgcagcgcgtggacaggctaggggtcgcgggagcgggagggaggcgttgccgggcctgtcgcgcaaggacgtcggtcctcccaggtttgagggcggtcaggcggggtcaaggccaggcagcggggcgcgtctgcgttgcgcccgactctccgcggttacctgtgcctagaggtgatttgaagggcaggggccgagagattcgtagccctgctgcggcgccgtcccggagttccccggcccagaccagacccgcggggcgccctcagcagcccgcccgtcttgcactcggagagcggtcctggcaggaaggccggccagtgtgcacccggttcgggcccctgcgcccgggctggcaagatggccacgcccccagcagagacggcgcctctaggacaccatcggggaccgaggtacccgagcggtccgcccgccttccctgcagtgagacgatcccctggggggttccttgggagcggagggactcgggtgaggcctaactttgggtgacctccccttgcagtttcaacgtcggtaaacccaggagagtgaaggccagcctttaactgtctcctgaggttgtgtctgtcattagaggggcccgaaatgataatagcttccatttatgtactgctttctaggtcgctacgttttgtttacattcattatttcatataggcctcataacccagtgaggctttattgttctcatttataggacatttgtaggaagcggaggcatagggaatgagaatgcctaaagttacatgatagaattcagattcctagcttcagctggatattcttttttctctgtacatttgcctcgcacacttaatcatggagatgtacaggccacagcatttaatccacagtacaataaaacctgttattcgttaactcatcaagtatgtattacatgattcttgcgataagagaggtgaaactgcccccagtgttggaatctttttttttttttttttgaaatggagtcttgctccgtcacccaggctgaagtgcattggcaccatctcggctcactgcaatctccgtctcctgggttcaagcaattctccttcctcagcctcccgagtagctgggactacaggctcccgccaccacacccggctaattgttttgtatctttagtagagatggggtgtcaccatattggccaggctggtctcgaactcctagacctcgtgatccgcccgcctcggcttcccaaagtgctgggattacaggcgtgagccaccgcgcccggccacatttctttaagattccaacactgggccgggcacggtggctcacgcctgtaatcccagcactttgggaggccgaggtgggcggattacctgaggtcaggagttcgagaacagcctggccaacatggtgaaaccccatctgtaactaaaaatacaaaaattagccgggcgtggtgaagggtgcctgtaatcccagctactcgggaggctgaggcaggagaatggcttgaacccaggaggcggcggttgcagtgacccgagttcgcgccaatgcactccagcctgggcgacggtgagacttcgtctcaaaaaaagaaaaaaaagtaaaatgtctgctaggttttgggaggtgccggtatttatgtcacataaaacagtttgctcggctgggcgcggtggcccacgcctgtaatcccagcactttaggaggcagaggcgggtggatcacgaggtcaagagatgaaaaccatcctggctaacatggtgaaatcctgtctctactaaaaatacaaaaactagctgggcatggtggcgcgcgcctgtagtcccagctactcaggaggctgaggcaggaaaatcacttgaacccgggaggcggaggttgcagtgagctgagatcgtgctactgcactccagcctggcaacagagcgagactccatctcaaaataaataataaaataaaatggtttcctcctgttttcagtagagatggagatgaatccatcccttttttcctatagtaattccatccattctgtcaggaggaataggtattggaagcctgttgagcatccaggggatcaaggggtgttagacaagtggattcttatctttctcccttctgttctttctccttaggaccagctttatccagggactctaccattcccacccctttggccccactccacgacaaccacttccccatcttctcctctattctggtctcccctgcccccacgccttcccacccagcgtcttccccaggttcccccactacctctccctcagatccaggccctcagctcagcatgggtggttctccctccaggaaagggggaggagggaccaggacctgagttgcatagcggctgcctggatgggcttagaagcctttttgagggacctccctgcccctatcctggggcttggatacctttccaagtccctggaactgcccacccttcccctgccaccccgtcaggagatcctagtatggaggaacatctgtctgtcatgtatgagagactgagacaagaggtaagtcagtgcaaaagtggccttcgtctacagtgggaaggatgtgggtaatccttggacgtacagggatagtcaactggattcttttttggaaccatgaggcaggcatagaaatatattataaacattttcctgagaaaatgatgttccagccaggcacggtggctcaaagtgctgtaatcccagcactttgggaggcttaggcaggtggatcacctgaggtcaggagttcaagaccagcctggccaacatggtgaaaccccatctctactaaaaacacaaaaatcagccaggcatggtggcagacgcctataatcccagctactcaggaggctgaggcaggagaatcgcttgaacccaggaggcgcagtgaaaggaggtatctccattgtactccagcctaggcaacagagcgagactccgtctcaaaaaaaaaaagaaagaaagaaaatgatgttcctcattttgggttaagggaggttaatcatgggatgagatctttcactccaagatgggagtaaggaggccttaaaaatagaaaactgggcctggcacatggctcacgcttataatcctagcactttgggaggccgaggcaggcggatcacaaggtcaggagttcaagaccagcctggccaacacagtgaaaccccgtctctactaaaaatacaaaaattagctgggcatggtggtgggtgcctgtaatcccagctactcgggaggctgaggcaggagaatcgcttgaacctgggaggcggaggttgcagtgagccgagattgtacctctgcactccagcctgggcgacagagctagactccatctcaagcctgtaatcccagctactcgggaggctgaggcaggagaatcgcttgaacctaggaggcggaggttgcagtgagctgagattgtacctctgtactccagcctgggcgacagagctagactccgtctcaaaaaaaaaaaaaaattagaaaactgaaaaataggattatcttttctttcccactgggttgatgccatcttcttccacctagcttcccaagctcttccttcagtcccacgactacagtctgtattccttggatgtggaattcatcaatgagatcctcaacatacgtaccaagtgagaattggggcacaggtagggcactggggaggaaaagcacccaaaggtatatacatgacccttttcacttcccagagaagttcctagactgcttctcacagctgttccccattccttagaagccagtttggttttctaattctgccatcatgagatttctttcccatcccttcttcacaggggccggacatggtacattctttcactgaccctctgccgtttcctggcctggaattattttgcacaccttcgtttggaggttttacagctgacccgccaccctgagaactggaccctgcaagcccggtggcggcttgtggggctgcccgtccacttgctctttttgcggttctacaagcgtgacaaagacgagcattaccggtaagagagaaatgagaaaggacccaaactataatcagttccttttttttttttttttgagacggagtctcactctgtcacccaggatggagtgcagtggcgtgatctcagctcactgcagcctctgcctcccggcttccagcaattctccagcctcagcctcctgggtagctggaattacaggcacaccatcacacccggctaatttttgtatttttagtagacagagggtttcaccatgttggccaggctggtctcgaactcctcaccttaggtgatccacctgccttagcttcccaaagtgctgagattacagatgatctagtctcccagacaacccttgacctatcctcacttgactgtttaaggacagggatcctgtttagtttatgttaatgttaaaaaaaaaatagagactgggtatattagaaaaacctctgagcttcagtttcttcctatacagtgcctagcacatggtaggtactcaaatacttactgaacagactgggtgtggtggctcatgcctgtaatgccagcactttgggaggccgaggtgggcggatcacttgaggtaaggagttggagacctgcctggccaacatggtaaaacccaaaaaaatacaaaaattagcccagtgtggtggtacacacctgtagttccagctacttgggaggctgagatgagagaatcacttcaacctgggaggttgaggttgcagtgagccgtgatcacattactggactccagcctgggtgacagagtgaaaccctgtcacacacacacacacacacacacacacacacacacacaaaagtactgaacaaatgaaaagtcctgtctcatatgttgagccttacaacctggtaaatttccgcctgggagtagaatcccaataaattgttagactcagccacaaacattggatataagtttttaaaccagcagttcccaaactgctgcacagtagaaatgcccaaggatcgttaaaaaatattgacgccaaacactctgatttaattgagacagggcacaacctaagcactgagatgtttgtaagttgcccaggtgatctaatatgtagcagaatttagggactactcgtttaaacaaatgcttgaattcagctttgggaccagtcaccttctccctcagtaagcctccctctattccccaggacctatgatgcctactccactttctacctgaattccagtggcctcatttgtcgccatcgtctagataaagtgagtcctaggtagggctgggtggggtaaagggtagaacatttgtgtgcctcccccaactggcattaacctttctccctgcagctgatgccttcacactcacctccaacgcctgtgaagaagctgctagtgggagccctggtggccctggggctgtcagagccagaacctgacttaaacctgtgttccaagccctgatccttgaccttggagtggaggcagcactgaagactgctacgcccaagagaaggaggtggaggcagccaagaatctcaggagccagcttcctctcctcgtttctctccttccttcctttccatctcatgctgtgtaaagctgctgtgtaatttaacttgtaaataataaagtttaactgactatatgagatagaatttcacatatcactttctctagatcccaaatgttcccacaagctttattccaaaaataattttatttaataggtattaaataatgtatagaaggaaaaggagctggtgtcaggttctgtttacgtccttctcttaccctagctcttctcgtgttttgcctatttttttgggcattttcttagcatggggatcttctagctccttggccttataataatggggagccacctccagaagccaactgctctcaatctccagtacctaggagagagaaaagatcaatggagttcccttctttccaacatagatcttttgttgttgttatttttttttcttaaattgaaacagagtcttgctctattgcccaggctggactgcagtggcgtatcatggctcaaagcagtcctactgcctcagcctcccaagtagctgagactacaggcacacatcacagtgcaccattaattttttgtatagttggggtctcactatgttgcctgggctgatcttggcctcccaaagtgctaggatcctgccttggcctcccaaagtgctgggatggtttacaaaaatgagccactatgcccagccccaacctagatccttatgtgtatggtcaaaagttatctttcctctttgactgcagggctaggtgtaaaggtgcctggctctattattatatacccaaagggcagatacacctctgtatgttattcaagataccaaataagctattcccaagaaaagtctagaacaacatgccaggcacagtggctcacacctgtaatcccaacactttgggaggccgtggcaggcggatcatgaggtcaggagttcgagatcagcctggccaacatggtgaaacccagtctctactaaaaatataaaattagctgggcgtggtggtgggcacctgtaatcccagctacactggaggctgaggcaggggaatcacttgaaaccgaaggcggaggttgcatgagctgagatggtgccactgcactccagcctgggctacaacagcacggaactctctcaaaaaaaagaaaagcctagaacataaagactatactctgtgagaccagagactgctttgttcattatagccccagcacctatacagtagccattcaaatatttattgaataagtgtctagttctcagatcttggaagatgctgacacacctgttagaaaggatgtctttgggctgggcatggtggctcacacctgtaatccctgcactttgggaggccgaggcaggcatttgagaccagcctggccaacatggtgaaacctcatctctactaaaaataacaaaaattagccaggcctggaggcttgcgcctgtaatctcagctacttgggaggctgaggcatgagaatctcttgaaccccagaggcagaggttgcagtgaggctagattgcgccactgcactccagcctggacaacagagtgagactccgtctcaaaaaaaacaaaaaaaaacaaaggatgtctttctattttaccctaccttcctctttctgtaccagtcccagcaacttgaacctgggttcttagcttgccaggacaccatctctctacatagtctccacctgcgtgggcacaggatgttctcctcacctgtctcatgaactctttggtggtcaagacaagttcgtggtagagcagccagcgtggctgttgctcaaagagggaggagttgggatgaatgaagactgtctgctgctgtttcactgtgcggtagccactccgagtcaaccgtgccgtgtggtaaaagtaaccagcagtgatggcctaaggagcgggcaggaaagaaaatcaatggaaaaggcagacatctggggaccctaagaatgcactacctttttagttcaggcttcaggaaaactagagaggtaaggaatgcatgaagaacttcccaggaatgaaccttcagtggtctggggaagaaagggccctgggaggacacgtcatacacaaggggaagagggcatgctctcacgctggaggaaatgctgcatgcccccagagaagcttgctcctgggaaggtactgggggtggaaagcaggaggctgaagaaatgctgaccttgcgtacacggatatagtccccctggcaggaactgagaccaacttccacacgttccaagagcccttccagctgttcccgcacatcccgggctcggcgcatcgatctgaactgtacaaagttctcatagcaccactgggaagagtaaccactctcagcccactgggaagacagttaaaaagaaaggagagataattaagtatacagcaggactaaagtcccccagtgtctctcattcccactcacccaagcccagtgacctgtgtgtaaacatttagcagaaccaggtggtcaccgccagggagaaagaagttgacacgggcattgtcagcatggacgaccttgtcctttggtcggtagaagatggagttgttgacagagagcatggcagccactgtcaggatctcctctgaacagctgtacctgggacaggaaggggaaagcatgagttcaaagcaagacacataggaacagatatggtggagtggggagtgatcactgtgtgatggatgtttcctcatgtggggaaggctggttggcataatggctacaaagcagccagcagatagattctggcagcagcttgggggtcaaggaagtaggggccatagatgaaacacagtcacaaaggagggacatccatggaggcaggagcaggaaacaccggggaattctgaggcttctgcagaaagtgtgcattcactatgtgcatttggaaaagatctctgacagcagaggaatggcatttaaaggtcatccctccacagctacatctaaatgttctagttggaaaccttaggaacaagtaagttcctcaaggggccgggcgcagtggaatcaaggataggatcaagtgtcttacccttgtgggcctcaaaagggggcaatcagagttatctaatactttattatgtgttaagggatagtatgatgaacagaaaaagacagacaaaggggaccctggagacagaggaggcctggcctgtttgtgtgctgggggcccaggtggaggcgagggcttacttctcagaggctaagatcattttggacagcatggggtccaccggcagctctgccatctttcgaccagactaaggagaagagagagagagttgagcccagtcctccctcaggtttcccgctactactacaggggtccctggagccatcctgacccctatcatcctgcctccacccatgctgccccccgactcaccgtggtgagctccccaaggtggttgagggctcccagagcatacagctgctccaaagccagcagcagtgtctcatatggtggagggtccaggaaatcaaagtgcattaggtcatggatccctagaaagaggtgtgatggatggaacagagtcccttcaaaggacagtgactccagcccctccctcctctctcaggtagcccaatcacctaagctcttgagcagcaacacgacattgcccaagctggtcctctggatctcaggcactgtggtttcctcaagctcgtgctgataggcccaggcggtatacaggcggaagcacttccctgcagccacccgacctgccctgccagctcgctgattggctgaggcctggaaagaaaggggaacaggctggctgacaatttggtcagggaaaagaaaaaggcagtatttatgcaagaaatctggaaggatgcaaactgctcatcccggttccctaggaagcccccaccctgcttctgagttggaccttctctgtgggccaactccacctcccccactcccatgcatccccaggctgaccttgctgcagggtgtgacagtgagcgattccatgcctgtgcgggggttgtagctcttctgcttacagaaccctggatccagcacataaatgatgccctcaatggtgagtgatgtctcagcaatgttcgttgccacaaccacctgagtgataggatatggggtcacccagtgaccccacctacctagttacccagaaaaagtaatcttggaaagttaggagtagtgaagcagttgcagtaaggggcaggagctgagggaattagtagtatccaaggtcaggagcaggggacaaggccagaagacaggggacagggaagtgggggctgggagtcagcagggccataggaggaaaggaaatggagaagaggatttagggtttttttttttttcagagatgggaaatgggggtgttcaagttcctgccccatcctccccatcaccgctttcgtcttcacacaacacttcctgtaagagcctcctaacgtgtatccctgcttctgctcctagcctctgtcacatggcatccaggatggtccttttaaaatacaaacctgtcacatcactccccatccttcagtggcttcctatcctactctagaattcaatccaagccccttaaaagcctggatcacctaccccagctgcctttctgacctcatctgctagcactccaccacctccctcactcctcccacacactgctttgctctgcccaagtaagtgcactcctcactggatcatttgcatcagctattccctctgtctggcatactcttctcccagatatcagcctggctccctccctcacctggtttgggtctctattccactttccccttactgaagaggccctccctacaccccaaggaaaataccttcatgccagtcctcactcccaccccacagagtcaagttccatcctactatgctgccttgtatctcttcatagcactggccacaaattgacaatatgtatttatgcatccactgcttccccgatagaccacaagtgcaagtttgttaggctaaggactttgttttgttcatcactgtatcatcaacccctgtgtacctgacacacagaaggaactcattaaatatttgttgaatgaaagttatatctctgctcaaaatcctttgactgctactcagctgtctaaagtccaaacttcgccaagcacagtggctcatgcctgtaacccagcactttgagaggccaaggcaggcggatcacttgagtccaggagttcaagaccagcctggccaacatggcgaaaccccatctctactaaaaattagctgggtgttggccaggcatggtggctcacgcctataatcccagcactttgggaggccaaggtgggcagatcacctgaggtcaggagtttgagaccaacctggccaaaatagcgaaacctcatctctactaaaaatacaaaaaattggccaggcgtggtggagggcacctgtaatcccagctactggggggctgagacaggagaatcgcttgaacctgtgaggcagaggttgcagtgagcagagttggtgccactgcactccagcctgggcgacagagtgagactccatctcaaaaaaaaaaaaaaaaaaattagcttggggtggtggtacacacctgtaatcccagctacttgggaagctgaggcacaagaatcacttgagcctgggaggtggaggctgcagtgagccgagatcttgccactgcactccagcctgggcaacagagcgagactctgtctcaaaaaagaaaaataaataaagtccaaactttcctgtcatcaaaggccctccctaatcttagccccaaattgtttttagccttgtctcctactccttcaccacatgaacctcccactaagcctactagctcacactctgacctcaaacataccttgggccttcctctgatgacttctcagccatttttcttttttgagatggagtctcgcactgtcacccaggctggagtgcagtggcacaatctcagctcactgcaacctcctcctcctgggttcaagcgattctcatgactcagcctcctaaacaggtgggattataggcgcacgccaccatgccctgctgatttttgtattttcagtggaggcagggtttcaccacgttaggcagcctggtttcgaactactgacctcaagtgatccgcccacctcagcctccgaaagtcctgggattacaggcgtgagccaccgcacctgacctcagacatttctcttaaaggtccatatcaaatcccacctcttagcacatcaaggacttcccttctccactgaatctactgtgcatactttccagatcacatatttggctctctcttggttcacaccatatttctcctctcttcagtcccaggaacaagggactggctgctcctcagctgtgtgcagcagtgcgcaggactcaccttgcatggggcaggcacacagctttttcactactagttgtgggaagcataggggtgaagagtgtgggtttctccaactgacctttcgtgccccaggtggtgtgggctggaagatacgggcctgcatgtcagagggcagattggcataaatgggcagcaccaggagctcccggattttggagcccaggcggcggcagcgatcctggagcatctcacaggcagcctcaatctcctcctggatagagggtagggagagcagcaggggtcccagagtcacagaaggccaacatgccggccctgtcttcccctgggatacatcatcccctctccccaccatgtcaggcacctgtcctgtcaggaacaccaggatatccccagggggctgggtcacatggatctgcaacacagatactacacaagcttccaagtagtcagcctctggagcctggagagcagaaagagatggggtcacaggagggccacctgcttaggcaaacctttcctctcctcccaattcaacatacactttatcctagttcccctttgaaccttccattccatctttccctccacaggataaccttctccaaaggcctcagcttttctgccacagacttaagcccatcctccctgagggggcaccttggtgtagaagatgtccacaggaaacctgcgtccggggattcgaaacacaggggcgtcatcaaagaaggtggaaaaacgggcagtgtccattgtggctgaagccaccaggaccttgagctcaggtcggaagcgagcaacatccttgatcaatccaaagagaatgtctgtgtgtagggtcctttcgtgtgcctcatccaccatcaccacgctggggagggaataggagagcaatgagggaagagcgctaggcaatgcagtatcagacaccagggttaactggatgagaggggagtaatggacacaaagagttcaagaatgactgttgacggagggggctctaaggagaagtcagccatcccacttatgtagagcaacagaaagtcagagaaggccagggccccatgatctgcaacctatcccagcctcagcagataataggagacaagatgtagaggctgcacactgaggccaggacaagttagccataccctctagttcagtcaagagtctgcttagactcagcagctgctcttactagaaaaagttgaaggatatgttttaggctgggcatggtggtagctcacgcctgtaatcccagcaccttgggaggccgaggcaggtggatcacaaggtcaggagttcgagaccagtctggccaatacagtgaaaccccgtctcttctaaaaatacaaaaaaaattagccagatgtggtggtagacgcctgtagtcccagctacttgggaggctgaggcaggagaatcgcttgaacctgggaggcagaggttgcagtgagccaagatcgtgccactgcactccagcctgggtgacagagcgagactccatctaaaaaaagaaaaaagaaaaagtggaaggattttttttttgagacagtcttgctctgttgcaggctggagtgtagtggcatgatctcagctcactgcaagctccgcctcctgggttcacaccattctcctgcctcagcctcccaagtagctgggactacaggtgcctgccactgtgcctggctaattttttgtatttttagtagagacggagttttgaaacagagtctcactctgtcgcccaggctggagtacagtggcacgatctcggctcaccgcaagctccgcctcctgggttgcgttcacgccattctcctgcctcagcctcctgagtagctgggactacaggtgcccgccaccacgcccagctaattttttatattttttagtagagacggggtttcaccgtgttagccaggatggtcttgatctccttacctcgtgatccgcctgcctctgcctcccaaagtgctgggattacaggcgtgagccaccgcgcccggctgatacgttttaaaggaaaaaaaaagtggaaggcagggtccctttcaataagggtgggccagcaaggctgactgggggtaatagacctgagctgctgtgattcaaatagcctagaagctcctggtgtcctgtgggacaactgctgctggcatcattcttgactgtttcttcttttggagacaggagcaagttaagcctttctacctcaactctcacaggactctgcatgctccttggtttcctcctaactcagttatgtgcatgacaccttctttctctttgttctttggcttttctgggtggcagccaagtcccaggaactcatccccatcttcccctacccacctccctgacctcaactctttgtgcctaaccctaactgtgatggtgaagtccccagccattccacaaagcaggctggctcgatgggcaaaaacatctgcatcagacactcttgcgctggctggctctccatgggttcttagagatcttttgcaagggatatgaaggataaaatcctatctgtccaattgctccactgtgatcttccaagaccagaaattcacagcctctgaagagtcaaaaaggcacatattgttcagctggcctgaccccacccccattacattcatgaatcccttttccccctcaacacatgttcaaccaacccctgcttggccatttccagcactaagagctcattattcacagaccaagctacccaagacttgtgtggagggccaagacccagagtccaaccactctgacaggccctgcaatctccaccactctgagggttactcagccattggtattgagttggaatctgtctccctgtaacctccccatggctcctagctatgtcgtgtagggtcacataaaacaatctgatccttctttccatgtaacagccttcacatatttagagggaaccaggatgcttcctgtttctccctctgagctgagcattccaagtgttttcaaatggtcttcacacggtatttcaagtctcggcagcaatgctctgctatcctggttgttttctaaaccctggagatgaatggggaaagaagaggctttctctacaatctcttctgtcctccagccccatctccgtggtacctggaggtcagttcaaggaccatttgaaccacaaagattcaagaacgggtggattaatcagaagacaatggctgaattggctgggtgggaagaagggagagaaaggccagagattagagatacctgtaactcgccaggtcaggctcagagaggaactcccggagaagcatcccatctgtcatgtagcggaggacagttcgctctgatgtgcagtcctcaaagcggatgctgtagccaacctggtcaagggaaccattagcaaccaagtgtgggctggtgtgccctgaaaggaacttggggaaaggtgaagtggggcagcaccaagacttctgctgtagggacctgagggaactgtagactgagtcacagaccccagactctaccccccggttccctagaaatctcacctcattcccaagcttcacacccatctcccgggccactcgggcggccacactcatggcagccactctccggggttgggtgcaggcaatcttcatacccttgtttgtataaccctgaatgacaaagaaaaaagaagaagtttgccctttactaaatatgcaccctgggaccaggtacatttcagagaaagaagttgtaaaaaccaggcaggagaaaaggaggaaaagacagatgctgaaaaccagaaaagaagggcaaatagataggatgacagacctagggccctcaaagggggtcctcacccagctctgggtaattaagttcatgactctgctagacttgagctggaaaagaacagattagctgagacagagccagctaaggtaaaaaagcaggaaggctgggcacagtggctcatgcctgtaatcctagtactttgggaggctgaggtgggaggatggcttgagctcaggagttcgagaccagcctgggcaacatagtgtgacaaaaaaattaaaaattcaaaattttgaccaggcacagtggctcacacctgcaattccagcactttgggaggccgaggcagacggatctcctgaggttgggagttcgagaccagcctggccaaaatggtgaaaccccgtctactaaaaatacaaaaaattagccgagcatggtggtgcatgcctgtatttccagctacttgggaggctgaggcaggagagtcgcttgaacctgggagacagaggttgcagtaagccaagatcatgccaccgcactccagcctgggcaacagagcaagactctgtctcaaaaaaaaaaaaaaaaaaatttcaggccaggcacagtggctaacacctgtaactccagcactttgggaggctgaggtgggcagatcacgaggtcaggagattgagaccatcctggccaacatggtgaaaccccatctctactaaaaatacaaaaattagctgggtgtggtggtacgcacctgtagtcccagctacttaggaggctgaggcaggagaatcacttgaacccaggaggtggaggttgcagtgagtcaagatcgcgccactgcactccagcctggtgacagagcaagactccacctcaaaaaaaaacaaaaaatgtttaatatgggcatggtggtgtgcacctcccagatactcaggaggctgaggtgggatgatctcttgagcccaggagtcccaggttgcagtgagtcatgatggtgccacatcactccagcttgggcatcagagcaagagcctgtctccaaaataaggcaggggctaggcacagtggctcacacctgtaatcccagcactttgggaggctgaggtggctggatcacttgaggtcaggagttcgagagcagcctggccaacatggtgaaaccccatctctactaaaaaattagccaggtgtggtggcgcatgcctgtaattccagctactctgaaggctgacgcaggagaattccttgaacccaggagtcagaggttgcagtaagccaagatcgcaccactgcactccagcctgggtgacagagcaagactccgtctccaaaaaaaaaaaaaaaaaactaacaaaaaggcaggaaaatagtcctttaactccttgttttttggccacgttggagcatagggaggtccacatttatacacgccccactccacctatccatctacccgtccttccaaatgaaatgaatgcaggaagtgagaacagaaatgtgaaaagggtatggtctttactctcaagaatttcacaatttagtggaaaagataggtaagtgactactaaaaatataatgtaaaaggagctctgacaggaatgaggacattgatgccaggtgccctggcaagctgaagggtgagatgactgtacctcctcaaagagatactgcgggatctgggtggtcttccctgagcctgtctcgccttcaatgatgaggacttggtgatttgcaatagcagccaggagctcctctcgaaatgggaacaccgggaggctgcggcggacggcctggatggactctttctgctgggcctgagttgaagtgggtggagctgacggctcctaaggaaagagaaggaggtgtgagctaaatagctcgctacgggtcttcctcagaaagtctcccagctcccctcttacctcatcaccctggagctgagtggcccggacaaactcaatggtctcctcctcctccagcaccagttgatacttgggctcctgagaggcagcatctcgggccccaaacttcagggacgctgccccaagccgcgcctcctcccagcgccgctgctcctccccaggggctcctgattcctcctccactagatccacagctcgggctggctacagagagaggggatatgtgaagactcaaaaacaggatgtcctctctgccctctcccctcttcccattactacccccgcccactgcccattgggaacggcaaggcaagaaaggggatgacccacgtgttgcccaatcccctgaagccttccccacaacttgtcttggggaccaaggctgaagcagacgccgcttcacctcacctgtcctcgggtttccttgggcatgtggtagcgattggtggcctccagcttctcctgctccccagctgcccggtactcccgggcgagatcccgcactcgccgcttatatttgagctcctgccgctcgtgccggctcagctccacgtccccaaaaaggaactcctcatcagccagctccgcctccaggtcctcaagcttctctcgctcccgcttagccaggtactctcggcgagatttcttccgcagctcagggacctgagttgggaaaggacagtcgaatcctcatcttgctggaggagcaacccctttctctaccaatccctacaagggaaaaatcccctgacaggcaggcatgagaacctcaggatgcaccctctaccttccctctgcaatgcacaaccaaaacaatgacatactcaaatctgggcctctttggatgctacatgctgaccccacatcgtatcttcctgcagcagaatccagctggaaagtcctcttaggcagcattatcatctttgttaatatagatgcactagggagatgtctgcgtagcttatattttactcttgccattttattcaaattagtggaaagggggaaaataaaaggctaatccagcgtttagaagcacaggactcaaaccgaaaacaattcagacaaagatagaaaccagtgagggggccaacaggaggcaatcttcagccccagttagatgttctttggtcttaaacggaatgactgtagtttgaggaagggagaaaaactgattataaaaagttaggactacagcatcagagtgtttctgtaaggcaaatgtaatcagggatgtttggctttctggtactaacctctcttcaccatgctgtgtctcacttagtttctacacatttacctttgatacaaacttttcaggacacattatggatgacagcagaaaactggcaatatctataaggccctttcctgccaggagtcctcccactatgacatcatcctctctgtgatcacaacttcctctactgcaaggtcaaagcccctctggtggctgggtgggcgtggtgactcacacctgtaatcccagcactttgaaaggctgaggtgggtggatcacctaaggtcaggagttagagaccagcctggccaacatggtgaaatcccgtctctactgaaaatacaaaaattagctgggcatggtagtgggcacctgtaatcccagctactcgggaggctgaggcaggagaatcgtttgaacccgggagacggaggttgcagtgagcttagctcacgccattgcactccagcctgagcaacaagaacaaaactgcatctttaaaaaaaaagcccctctgctgttctacccttaaggggcctggttctatttagttgtttggcttttcttgtttgttctgtaaagacttaaaatgcagtttatgatcatgacctaatctgggtaccacagtcaaatattccttccatggaagagccagatagattttttttttaatatgggcaaaaaatcagagccatttgagcattaaaaagaataatgatgtgagattataaaatactgaaaaataaaaattcatgagtccaatttgacacacacaaacaaaaaacaagggaaaaaaatctgtcaccagtgaaatgactgttacagcaaacgccttactctaaaaattcgtatttaaaaggaaacaaacatttaccctttttaagaaggaactgtagcttgttcctagttgttgaggaaaagctcttctttatagacaaattctagccaatacacgtaacaggaatgacagaatcaaaaaatcaccatttcggccgggcgcggtgctcacgcctgtaatcccagcactttgggaggctgaggcaagaggatcacgaagtcaggagatcgagaccatcctggctaacatggtgagaccccatctctactaaaaatacaaaaaattagccgggcgtggcagcaggcgcctgtagttctagctgctcaggaggctgaggcaggagaatggcatgaacccggaaggcagagcttgcagtgagccgagatcgcaccttgcactccagcctgggcgacagagcgagactctgtctcaaaaaaaaaaaaaaaaaaatcaccattttgcaatccccaataaaaataacatgttcaggaaaggattaccagtggcttctaaaagcatttgatgaaaggctattggtagaaaggatattaatactaatatatagatacacaactggatagtatgtccccgtgatatgacataatatgaagtgcacatcaccgcccaagaagtgttcctgccacaactgtttaatctgagtgtcaataagctttagacccaattcctgcttcaaagaaagcacagggcagagaagtacttaacaccacaagataagaatcaggcaaatccagaatgtaggacactgcaaggtgagacagacagagagagaaacaaacttaacatctaagacccaaatgcaatgcatgaaccttgactgcattcttgttaggaaaaagcagtcattaaagttattttgagggtaatgagggtatcttttattgtagagagatcttagtcgatacataagaattactgttcaacttcctgactgtgacaagagcattctgattttagaggacaatatctttatccttagcaggtacacactgatgtacttagagataaaacgccatgatgtctaagactcttttaaatggtctgaaaagaaaaaacataccacatttacaattacaatgcaaatactacccatagtattaaccatttttcaatctgaatagtgtctatgagtgttctttgttctattctttcaacttccctatgtgcttaaatatttttgtaatcgaaaaagaaaaattacagctgggcacagtggctcacgcctgtaatcttaacattttgggagaccgaggggggtggatcgccaaaggtcaggagtttgagatcagactggccaacatggtgaaaccctatctctactaaacatacaaaaatcagccaggcatgctagtgcatgtctgtagtcccagctgctcgggaggttgaggcaggagaatcacttgaacccgggaggcggaggttgcagtgagccgagatcatgccactgcactccagcctgggcgacagaatgagattctgtctcaaaaaaaacccgaaaaattaaattcaggccaaaacagtaacaccactaccaccacaactgcactgagatgtcccagaagcctaaccacagtcaatttcaggaagagatatgagataaattggtcaggagagacctgggaaccagtaggccattcttagaactccaaaagttggccgggcacgtggtgactcacgcctataatcccagcactttgggaggccgaggcaggtggatcacctgaggtcaggagttcaagaccagcctgaccaacatggagaaaccccatctctactaaaaatacaaaattagccaggcgaggtggctcatgcctgtaatcccagctactctggaggctgagacaggagaatcgcttgaactcgggaggtggaagttgcagtgagccaagatcacgccactgcacttcagcctgagcaacaagtgcaaaactctgtttcaaaaaaataaataaatgaattttaaaaagtaaaaagggccaggcgtagtggctcatgcctataatcccaacactttgggaggccaaggcgggcagatcacaaggtcaagagatcaagaccatcctggccaacatgatgaaatctcctctactaaaaatacaaaaaattagccgagtgtggtactgcaggcctgtagtcccagctactcaggaggctgaggcaggagaatcgcttgattcctccaccagggaggcacaggttgtagtgagctgagatcgcaccaccacactccagcctggcaacagagtgagactccatctcaaaaataaataaataaaaataaaaaataaaacaaaacaaataaaaagaaggctgggcatggtggctcacgcctgtaattccagctctctgggaggccaaagcaggtggatcacaaggtcaggggttcgagaccaccctggccaacatggtgaaaccccgtctctactaaaggtacaaaaaattagccaggcgtggtggtgtgcgcctgtaatcccagctactcaggaggcggaggttgcagtgagccgagatcgcatcattgcactccagcctcggtgacagggcaagaccccgtttcaaaaaaaagaaaaaaggtttaaaaaaaaaaaaaaaggaacttcaagagtctcaaaattctattggggtattggggaatctaagtgtgactttacttgacaagaccaggcctttggaaaacagcttaccctacctagtttcacaccataaaaagtccagtttatgaattacaagggctctgtccctgtccagtgagaagacacagggagatcacaaagccacataaggggtgcaggaattaggtggtgggaaggtatttggagatggtgtgcctaagctgaatggtcagcacatccctgtacagtgggactgctgccctgcccttgccctccagcaaccttcttgacaacattccagctgcctcatatctcattaggactcaggaatagggaaagctcacaatttcattcactaatagagtatatttgatcctaaagttaagagtcaaggaggacttatgggtagcctccttccccctacaacttaagaaggatccttccctcaacaacataagtctatcctcagctggctcctaacaaccaagcccctcttctagaaacctgaccaccccatcagcatccacactgtgcttcctctgtatcctctctccctatacactctatcagaaagtctttccttttgtcttctgatcttggctccctaggccctgggactcaccatggccttccggtcttcctcggccatcttgaggcgcttctgagcctcttcataagcctagaagaaaaaacaagaatggaggggtgtgaggccaaagagcccccacactgacagctgctcccctctagaatcacaaggatcattcagatgcgccctaacacaaaaaatgtcccctctcagtgaggaatctctctgattgcaggtacagcagacagttgtcttagccacaggatgcacagggcttctctcaccacagaggtgaacatctcactagagacagccccttgtcttcccagagatcactatctctgcactcacagccaacctcagatttcaccctgggatcttggggatttacagaacatgctgctcctattcaccttcttgtctgaccgttccaggacatttcgagtccgatccttgtcccgctgtcgaacccgctcagcaaaggcatcacgctcctccaggtcctgaaggcgttcacgctctgtccgttcccactcatcttccgactctggcttctctgtctgctgtttactccccctgcagcccatccaggggattaaataagggcatagagaacacttcagcctgccccatcctctctcaccctgcttctgacttaccctgttttcttcttccctttctcagaagcctcttcctcctcttcttcctcacgcttcttcctgaggtgtttccgctttttacgtttcttctggaggctgcttccagccctactcacagtctcctcactgctctcttcactgtcttccagtaacctataagatcggttcttctccagcagggcccgggcctctcgctctgctgcccgagctggcttttctaccactgcctttcgtggtacctgtcagtagaggggaagataaggaggtctgagcaactcctgatctctgccctcccacttagctctgttcctaatttaagcaattacttagtctttcctgcccccgcggcccggccccactgtcaggcaatggcgtgatctcggctcacttcaacctccgcctcccaggttcaagcaattctcctgcctcagcctcccaagtagctgagattacaggcacatgccaccacgcccgactatttttgtatttttagtagagatgaggtttcaccatgttggccaggctggtctcaaactcctgacctcatgatccactcacctcagcctcccaaagtgctgggattacaggcatgagccaccgcacccgggcacaattacttagttttaaaccagctaaccagcattcattctctttcttcctcatggcttcaccccatcttcatcatcctgaatggggttttttatttttttttacagacagggtttcactctgtccctcttgggctcaagggatcctcccacctcaggctcctaagtagctagaaacacaggtgcacactaccacgctcaactaatttttaatttttttgtaggacgaaggtttcgccatgttgcccaggctggtctcgaactcctgggctcaagtaatcctcctgcctcagcctcccggggtgctgggattacaggtgtgagccactgcacccggccccctctgttaattaaacgactgaaaggaagttcagaagatgaggggggccgggcatggtggctcacgcctgtaatctcagcactctgagggggctgagagaggattgcttgagctgaggagttagagaccagcctgcgcaacacaccaaggcctcatctctaaaaataaaaataaaaataaaagatattagccgggggtggtggcgcgcgcccgtagtcccagctaccggggaagatgaggtgggagggtcgcttcaaccagggaggtcgacgctgtagtgagccgtgatcttacgaccgcactccagcctgggcgacggggcgagcgagactgtgtctctcaaaaaaaaaaaaaagaaagaaagaaatgcagaaactaagatccctactgaatcgcaatctgcattttaacaagaaccttggatgcatgttaagagttcgagaaacaccgttctattgcgcttaacccgacacacctaagccctcctcaatcttctccactgagctgggcgtccagcagctagcacagtacctacgcgacaacggacaaagaataagtgcttgtgaactgagctttcttaacttctcgatggaccgttaggccagcctcaccgggacaaatcacagggcccctccccacccctgccgacaccttgttccagagtctcagggcgaagtcccgggccggcccactgagatccaaggtatcagtgtctcgtaggcgctgcacgaactcctcggcagaggtgcagcgctgtgcggtaccgatcagaaactgggcgacgtgccgctcgctcagccccaacaccgagtgcagctcgtcctgaacccagcgctccagacccgccggcgtcgccatggcgactcacgctccctgctcccggccctgaagcgtcgggcagccgcgctcactgctgggccggtcagaggcctggagccctcggctggagcctcagcttcgcaagtcagctaccttgggacctctaggatcttccgacatcccaaagctgtcttcccgtaccgcggagcccggaaggggctgtactttttcggcctctaagcactacggtggccgagcgagttcaaacctcgcggaaccatacctgaaaactcggggtaattcttttttcttcatttcgcctctgtccagtttctctgacgccccctgatggtcagtctgtgagtgcttcgctcacgcattcattcaacaagtgaaattaatttaatggatgcctaatgtgtgctcattgctttccgtccctgggatatagcagaggacaaatcaaaagttccttaccaaatttacattttgcggtgggggagggacaggatacataataaagaaagtatggaaattttatagagccaaaaactatacaaagtaagggaggaatgaaattctatttcagattggaagatcgggtccatgctcataaaacatattagcattgttggccgggcgcggtggctcatgcctgtaatcccagcactttgggaggccaaggcgggcggattatctgaggtcaggagttcgagaccagcctggccaagatggcgaaaccctgtctctactaaaaatataaaaattagcctggcgtggtggtgtgcgcctgtagtcccagccactcgggaggctgaggcaggagaatcatttgaacatgggaagcagagtttgcagtgagccgagatcccaccacggcactccagcctgagcaacagaggaagtctctgtctcaaacaaacaaaaaagtgaccgttgctaggactggtttgcctgcagcaggagtgaagacaggtcaggtataagggaagacctctaggcaggaagaaactggggaactggggaaagttgttaaagacaaaatctccaaactaaggaacaggcaaactgtgttctgcatttttgcttaacagcttgagaaaatcactggtggctgcttatttaaaagtaagcaaggccaggtgcagtggctcttgctgtaatcccagcactttgggaggctgaggcaggaggatatcttgagaccaggggtttgagaccagcctgggcaacagggtgagaccccaccatctctacaaaaaattagccaggtgtggaggtgtgcacctgtagtcccagctactctggagactgagacaggagaattttttttttttttttggagacagagtctcgctctgttgcccagactggagtgcaatggcacgatctcggctcactgcaacttccgcctcccaggttcaagtgattctcctgcctcagcctcctgagtagctggaattacaagtgtgacaagcacatgccatcacgcccagctagtttttgtatttttaatacagatggggttttaccatgttggtcaggctggtctcaaactcctgacctcatgatccgcccgtctcggcctcccaaagtgctgggattacaggcgtgagccaccgcactgggcctgagacaggagaatctcttgagcccaggagccagaggttgcagtgagccgaggtcaggcactccaacctaggcaacagaccaagactatgctcaaaaaaaaaaaaaaaaacaaaaaaaaaagctgaatttgttactcgatgctctgctgtctgatttgtttgatcctgcatcatacttttgtgattaattgcagttaccaggcactactgttaggaaatgaaacattgttcttattaatagccacaagtggatctacatcactgacttttttttttttttttttggaaagggagtctcggagtctcactctgtcgcccaggctggaatgcagtggcgtgatcttggctcactgcagcctccacctcctgggttcaagcaattctcctgcctcagcctcctgagtaggcgggactacaggtgcgtgccaccacgtccagctaattttttgtattttagtagagacggggtttcatcatgttgcccaggctggtctcaaactcctcagatgaggcagtccacccgccttggcatcccaaagtgttaggattacaggcatgagccaccacacctggcctgacctcttgaatgcattgttttctgtttctgagatggactgtgagcacccctggcacctcggagcttcctaactctgttttcctgggtcacaactggaaactttttaagacctttacctaacaggctactaatataatcattctgtttccttccctacccagaccttctctgaactggctgagtcttttgacacctggcttgttctcttgctagtaaattgaaaacctttggcgtatgcttaagttcaatttgtctcatatattttgttttatagtaaaggtgtggggcctcctctgaccagtctgagaggagcaacttgtagtggtagaaggactataactattcaaccatatctttgttagcctggagagctaacaacaaacaaacaaattttcctgatgagtaaaatattgatgttccacatttgtataagatattctttgaaatgggaaaattccaaatatcaactacatgggcaccaaagccatgcactatcaagatggtttttaaacctttttttttttttttgagatggagtctcactctgctgcccaggctggagtgtaatggcgcaatctcagctcactgcaagctccacctcccgggttcatgccattctcctgcctcagcctcccgagtagctgggactacaggtgcccaccactatgccccgctaattttttgtatttttagtagagacggggtttcaccgtgttagccaggatggtctcaatctcctgaccttatgatccgcctgcctcggcctcccaaagtgctgggatcacaggcgtgagccaccgtgcccggcctttaggcctttaacgatataaaatccattgtctatcagaggggaaccttttccaggaaactgactcttgtacatacttacttcattttgcagcaatttcagatttagtattcgtagccccagctctttaagtaagtatccctggattagccacatgggttgtgtcatacactacctagctgccttcatggcagcaggcttctgaatactagaacccttcaactcaaagtgtcctctgtaatattttaacccttttcttctattcattcatttgttgtcattcattctagaaataattccgtgtctactagttgacaggtacaggatattgcagtgaatccagctgatgtagtcagccctcatggcacttccagtctagtggacacttcaactgccctttctcatgtcacctgcttgtcctgcgtgaaacccacgtgcagcttcccagaccccttttgacatgtcagtgccgagttcctggttcatcccccatcattttcctctcccccagccaccagagcctcccctcacataccctttttttttcccaaagaaggagaagcagacgagttgaagagaactccattttattatggaaagttaaaaaacaaacaaaacaaaacaggcaattgataaaggcggcacaatggggaaggagaggtgaggtgtctccttagccacccgacaccatctcaattcagttcaattgtgaaccactaggagaaacagaattaaataactatcaaggggtacagagttaagagttccagccttccctcttggggaaaactaaggcaaagtaatactgagaaaaagtggaggaagccacaccttcaggtcactccaatgaggagactggaggggacagaggagagaattccacgcagacacagcaagtaagcgtggcttgtaaacctgggactttggcaggtggggctgggagctgatggaatttgtaaaccaggctgtggtcaagggaggaggcaggagctgtaaacaaaggggcagtgacctaggaaatgaaggagatgtgcctataaatggagtggggtctgggcctcccagagagacgagtgcttaaatcccgagagtccccacgggatggtggggaggaaggctgtggggagagtgtaccctgccatggggggcaggtgctccatctccaccctccagggagttctgtgccccttctcaggacttggcgctcactcttggatgacctaggatgcaccagcacgtttaaccccacccacaccagggactttggattagggtagaaattgggcaattggctctgcccccagaaacagggtggggaaagcaagttacaagatgttggttgcccttccctgccaggctcattatcagggtctgtctgccctgaatcttccgggctccaggatcttcagttataagaaggagggaggtatatccctatgttggaagatggtcaccgccggcaggactcatctgtgggagagggggcaataatgttagagaatgagtgagagcctctgccttctgcccacccttcccccccacacaaattgaagggcagttggcatgcaggaagtcctataatatcttccatatctaaagcatgttaccaccagtaaccacatccatcactcatttagctcggactctgtgccaggcatccttataactgtttaatctcaccataactccaggagagattaagtaatatgatatccagctgtggctcttggtgcttcacaaaaaattacttaatcttggcctggagcacctgtaatccaagcaatttgggaggctgaggcaggaggatcacttgaggtcaggagttcaagaccagcctgaccaacatggggaaaccctgtctctactaaaaatataaaaactagccaggtgtgatggtacacatctgtaatcccagctactagagaggctgaggcacaagaatcgcttgaacttgggaggcagaggttgcagtgagccaaggttgtgccactgcattccagtccaggcgacagagggagacgctgtctcaaaataaataaataaataaataaataaaattacttaatattttctacaagtctaggaggtagtttttggtttctgtttttttgagacagaatttcactctgtcacccaggctggagtgtagtggcgtcatctcggctcactgcaacctctgcttcccgggttcaagtgattctcctgcctcagactcccgagtagcagggattacaggtgtccacctccatgcctagctaatttttgtatttttagtagagatgggttttcactatgttggccaggctggtcttgaacttctgaccttgagtgatccacctgcctcggcctcccaaagtgctgagattacaggcgtgagccaccgtgcctggcctgtttgtttcttttgagacaggtcttcctttgttgcccaggctggagtgcagtgggtggtgcaatattggttcactgcagcctccaactcctgaggtcaaacgatgctcccacctcagccttccaagtacctggaaccacagctgcgcactgccacacctggctaattttttttttttttttgagacggagtctcactctgttgtcaaggctggagtgcagtggcacgacctcggctcactgcaagctccgcctcccaggttcacgccattctcctgcctcagcctcccaagtagttgggactacaggtgcccgccaccacgcccagctaatttttttttgtatttttagtagagatggggtttcaccgtgttagccaggatggtctcgatctcctgacttcgtgatccgcccgcctcggcctcccaaagtgctgggatcacaggcgtgagccaccgtgcccggcccacacctggataatttttcaatttttttgtagagacaggattttgccatgttgcccagggtggtcttgaactcctgggctcaagcgatccacccgtcttggcttcccgaagtgctgggattacaggcatgagccacaggaggtagttattattaacttcatttcataaataataaactaaagcaagagatcagatggtttccctgagatcacacaattaaagagacaagctggaattccaactcaggcctgtcgacccaccctgtgattttgaccagattacagcactcaggaagagttctcgttttgaaacctgaagactcaatgtgtacttcactgccggggacctcagtttgcccatctgttaaaggagcatgttgaaccagaggacccgccaagccccttccgagtgcctacatgtaatcctccctcctctctcctggaccacagcgcccgctctgacagcagggggcgccctcgggccggcggagcctccgcttacccacaatcagggccttggtgcgcagcccgccctggagctctggctgcagcagcagcagctcttcctcatcctcttcgtcgtcgggttgggctgctggagggttgggggcactggggacctcaggctccgggcccagctcctccagtaccgaactctcggaggggtattggtacgtggtctccagggctgtctcgctgaaggagatcttaagctgaaggagggagaaaaagggggcaggaggcaaggtcagcaggggagaagcccgcgggggttgagggagagaaagcgggggcggggggggcggagtctgcaagggagcaggtgggactggcggaacgtgggggtgggggctggactcaggtgccccactcactctccccatccactctgggatccagttttcctttccatactggctctccaattctagagtttccctcttcgatcatatcatttcaaaacatcagactttgccctgtacgttggcaggggcttgggaggcagaagtgaataatataagaccaaggtccctgctatttcgagtgtgggaggcagaggggtaaaaagaaattaaaatacatggcgataagtcttgtgatcagaaccgagtctttgggcaccttgggggcaatcgagtgaacttcccagaggagcccagcagactggccagtggggaaagaactggctggggagcgagtctcagacaaaagcaaggttttcatacccacagccccttgctgtcctatgcaaaacccaggaccctgggcacctgttccctcctactctcctcattcctctcctatccatagcaaagggagtctagggcctaggaagagatgggagatgaacagaaaggccgagaggaaccaagagactccagcaacacacaggggaaagatgagccactgacaccctgaaggctgggggagatgacaagggcagaaaggaaagtccacacaaacctggggtgggggtccacagtgtgcccaaagggacaggcacagagacaaaataccagacagggcacagaaaacccttggtaatcacactgtcccaagagcaggcgagtcccagctgttctcactgcctttctacccttcccctttgccctattaagaagctcagggggaaggggcagggtgggattaagtctaggagccaaagggattagggagacagcaggaggattccatatgaactacttggaaaggtccaaatgatctactcaggccttccctggcatctgtttgggaagacttggggtcagccgtacatccctgagtcccctaatgaactgaggtatgaaaagagagaagccagaagggtggctgggcaggtggttgttaagagctgcatcaatatgacaccagtcaggcatggtggctcacacctgtagccccagcactttgggaggttgaggcgggaggatttcttgagcccaggagttcgagaccagcctgggcaatagagtgacactgtctctaaaaaagaaaaaaaaagaaaaccagatatgacacctgggtccccatgggaaggtagaactcaggaactgtatatgttactccttgttggctctgaaccctgcagtgtctccccatctcacttggagcaaaaagtctactccaggctgggcgcggtggttcatgcctataatcccagaactttgggaggccgaggcgggcggatcacaaggtcaagagattgagaccatcctggccaacatggtgaaacctgtctctactaaaaatacaaaaaaattagctgggcatggtggcgtgcacctgtagtcccagctactcgagaggacgaggcaggagaattgcttgaacccgggaggcggaggttgcagtgagccgaggtcgcgccactgctctacggcttgggcaacagagcaagactctgtctcaaaaaaaaaaaaaaaaaaagtctacttgattgcccccaaggtgcccagagcctgaccaaagcctacagggtgctcccagtatgccaccctccccttgcctctctggcctcttcctccactccagccacactggccttggttccctccacgcactcctacctcaggaccagaacagtactagctattccttctgcctggaacactcccccaaaatatccccatggctctgaccctcctgatcaccctattttgaagtctccatattcactccccctacctcctgaccctctaagttccactgttctatttttttttccataatcacttaccaccttctaacttactagataatttactaatatattatactcatgtctgctgttgaaaggagcttggggccgggtaaggtggctcacccctgtaatcccagcactttgggaggccaagacaggtggatcacttgaggtcaggagttcgagaccagcctggctaacatggtgaaaccccgtctctactaaaaatactaaaattagccgggtatggtggcgtgcgcctgtaattccagctactcaggaggctgaggctggagaatcacttgaacccgggaggtggaggttgcagtgagccgaaatctcaccattgaactccaggctgggagacagcgagactgtctcagaaaaaaaaaagaaaagaaaagaaaaaagaaaggagcttagaagttggtacaatgcaagaggttagggtttgttcagacctcacatgaggtgccatcagaggaccaatgctggggaaacgatctgcgggtggtccagcctgtacacatttgacccccagttcatgtctgtggaactgctggtagaatctagtgacagcagccagactgcttatatcccaagttctcagaagggaccgcttaggtttctgtaactgacagatttacccacatttctgggaacccatttttgttttcttctcatatcctcttttggaataataacctctgtactttattttctactctgaaaatgacttattttatttgctctcggtctatgtttatatctccccccctaccctgcctgtctcctcaccccccaccaacttctgactgggcttctcagaaatgcacagcctgcatgggagtgggggggtagagagggggtgactcactcgctcctctcccatcagctatataaggtcacaatggggctggtctctcagcccaaccaagaggcctctggggtagggcaccagccacagccatcccctgggctccagtggcagggctgggatttctctcctgatggcagggataaatttgatggaattagcctgcaaacgagttatttagggaaggtgaagcgggggttggtggcagggtcctcctatctcctattcctgagccagtgtgttgcagcagagctgggacaaggcacccagtccctgaagaacagggtgctgacagggggtagagggtggagggtgaggcgtctgggtcagaggaactctgtgctgcctcctccccacccccacccaagcagcggctgcttccttattctctcaccacatcctgagcacagatctggcaggcccagggcccagggcccagggttccccactcagccccaccagccttccggcccccaccccaggcttcctgtttgggcgatctgcttccggctcccctgctctctggcctaggtatggtcaccagcacaggtcctgccctgcacttgcttcctggctcccctgggatgctccctgggctttgggccccaaagcttcatgcttccctctgctcattcttccccagaggcacaagcctctctcagtaggaagtgacttttctgaacacctcacccgggtagcatttccggacttctgtttttttcatctgcccagccctgaggggaacaggctggtagcagtcagagggctgagggtaggttcccaagaaccatggcttagaggtgggagcttacgcttcatgtgaagatgaattgggggatcaaatgaacccccctccacccaaggcttaacccgtatctttagtccctgtggttccccactgacactgaggacacaaaaaaatcaaatctgaggatgttaacacatgggatgagaatgagactgggcttcccaggctctggggagatgtgtgtgactggagggacttcctaagtctgagatgtctgagtgtgggacctctgtctccctagagattttcaagctggaaacagatggatgtgcacagggaagaagtgaggccagggccagggggagtcatcctggctgcccccactttcctgcaggtctttgttgcaagtctaacctctgaccctctgctggcctcagccccaacccctgtccagaactcccactgtgctccctggccagtgcctgttctcaaaactgtctccaaattcacttctctcttttgctaccctaaggggagggaaagtccaggatggcaggaaaagaggggaaaaccgatccctgagccagttcttgggagggaggggaaacccagggaggaaggacaggggagtgaggggcgggggtattttggaagaggagaaggcttttcttgtcccaagagagaagggagcactgtctgaagcagtggcccagctgggggtgtgcaaccccgaggtcacccacttcaaatggcctctctgtgtctctcccatggggcagactcggggttcaaaagccttctctctgctctttggccggcccggttccatctcccctctcccctccatcctaggatgtccctattcagctctgccctccttcccacggggcagttggacctttctccattcacttctccctgcagtttctccctagaacacaaacccaccccaccccctccaccaccccaggctccctatcccttctccccagaaaaactgcaagtgctctcaccctggtgaccctgccctcactgattcaagctcgtcactttaggctctcccactggatgggctggggcaggtcacactcaggaaaggaaggaaagaaaagggggttggaaactcagagcccaagggaagggagaatgagcagcctggcacaccctgaaagagacacacccagagacagcctttgctggggcaggatcttttgggctcaaaatggaaaaggagggctctgagaaggaagggtgtatgtgcagagcgaggaagggtggtggcaggaattaacaagaaagaatagaggaagacaagaaaacaggggtataaaaaagaaagagaccagagtccagagaaaattgacaagtggacttctaagaagtctggcttggctgcttccctacctgtttgtggtgtctttcgggggaccccttggcaaggcagctgcggctgagacggaggtagccccccagaaccaagatctcctcggcagttgggtaccgcttcttcccagcccccgggactgcagcatcaactgtggctggagaggttggggtggctggggtcgcagggggcacagaccgccgggggttgacggtgaaggtgtgtccactgcggcggggggcccccacccctggccctgccttcaccccatagaacaggcggctcatgaggggatccccaggaggttggggggcagttggggctgggggtgggggagacagaggggctggtggtgggggctggagctccactgcttcctcttcctgctgtctcaggcctccagtcccagcgtcctctggtgggaggggggagggcacagagcagcagttctgcagggctctcagaggcctgccctgagcccccgcctcctccttctcagcctccccttctccagcctccacaccgggagattccagaagcttctctgctgactctggaggttctagtttctgagtttgagcctctatgtccctgggtgtccattctcgagccttcccggagttcagggtccatttccacccttctgttggcttcatgcccctctcgccatcttccacaggcctctgctctgctgcctccactcctgcggaactgttgccttgggcctcccttgtcagggtctcggacagctctgcagtctcttttggagctacccctggaactggccactcttcttttctcccacattcttccgagtagtcttgtctttcttctcctgacctcagcctccactctgttgcctccagttgtaccaaactctgttcctgagactctctggagtcaggtctccatttatgggcctctgtcaggcccaacttctggtaggcagattcccctgggctcagtctactttccacctcttttctcctggggctttgctctcgagactctgctagtctcagactccgctctggagtttctccaggactcagcctccatttccatgcctctgacagtcgggagctcctgtctcccacctctcctgggctttgcctccagtcccgagcctccagaggcctcaggctcaactcttgggctccccctatccccagcctcctctctctggtctccctcggacttagtctctcttctcttgactctcttcccttggggctctgatcccgcatctccccagggctgggtctccgctcccgggcctccagaggcccaggctttctctctgctagcagctcttcactccgttgttgttgctgctgctgctgctgccgctcctgccggatgaatcggttctggtgcactggcccgatggcctccagaaggaccgcagactcatccgggtctggaggtccagcctctacagtccctagcacagggctaggctccccaggggacagcccaagcttggcccggcggcgctccaggagccctcgtttccaggctggcatctgggacaggcgctcccgttctgctttctctcggcctcgaacggacgcctcctcctgccggcgccgggctagcagctgtagcttccagtctgggatggtggccatggtcgtcttgaggtgagggtagggagcactggggacagagaacaggaaggagaggctccagagagtgagacagcccgggggtgagactgagggtgggaggagaggaagtggagggggagaggtgggacacaaagcagggcagaggggctaaggatgaggacagagggaaagacggaaggcagagaactggggaaatggaaaaagtgaagagaagttgtgagcccaagttgggggtggtgggggtgatgtgagaggaagagtccggattggaggcaatgagggcaggagccagatgtggcagcacagggttaatgcgtattaaagaccgtctctaggatgtgagaaagagagagaagggcgaaaaggaaagttggcgtgagggagaagagagaaatgtggcaggggtgaggggaacctgggtgcaggccaggctgcctcagcgataccccagggaggctagtgtgggaaggaaggaccaggaatccctgaaaggaccaggaggcaacgggacctgagggggtgttggggaggcaaggaggggcggagagcgaacaggtctagaggagaagggaaaccagggaagaggggaaaggagggcggcggcagcagccgggcgcgtctcagcgcgggccccaaaggtcccggctccgcttccagcaccgctcgggccacgcctctccccagcccccacccctctgccccgcactccgcccccgaggcgggtcgggggaaatacccacccccgagactttcggaacccgggcgtcagggctgccagcgcgttcccagaaccctggcgtccacccccaccctgtcctgtcaccaccgcctgcctcccccaccgactgccccacgcgaccccagagtgccaagggccggctccatgtctcttctccccggcgcctgcaagtcctgcgccccgtccccgctctcatgaagccgtgacagagccggccgtctccaccccgctgtagccgcacagactgacaatctcggcacaaagaggagacagccaaggtccgggccagggacgggagcaaggacaggggcgaggagacacccactccccaagtctgagcccctcagtcaactcacaggccgcgggacccccgggggagggggtgcggaggagccgggcgtccagagagaggaagaggaggagagagggaccgagggagatccggagactggagggaggggaggagggagggagaggaggagggaaagaggcagcaaaggaggagggacggagacagagaccagggggccgggcgggggcggcgaccgctttgtctaaggacaatgaggagagggaagggggcgcagggcggagccgaggagagggcggggcctagatccctcccaccccgcgtgggactcgctgcgggactgccctcttctcgccccaaccactggtcctccgctctgtccccaggggccctcaccagcttcccgcccggacacgccaggtgtccagatcccttcccccagctcgccgacccagggcggtggcccgtgactcaggcccctcgtgggactttgggaggaagcggcagctgctccgagcggggcccgcccttcccatctcctgccgctcctccctacgcttttgccttctcatctgggtctgtaggtccagcctctgaagtcctttgttttgcggggtcgagggcagccgccaggctgtggggggctttgtggatgggcggcaggagaggcgctcagaagccagaggttttggatgctccctcccctaccagagctgctgccccgactctttctagcttcaacctgtctcccttgggtctacaggtcggctgccgggaaaaaggggatttgaaggaatgggaatggggacccggccgctctggcaaagtgggggcgggtctgcgggggtggccgaaccccagcggttgccagagggcgtggtggctgcccagactccagttcggtgctcccaggctccctctggctttctttcccaaactcagccctgtagcttgggagacactgacagactgcatgccatatgtagaaaaaggctgacttttattttcctgcagagcatcttcctcgggagagcagggagccccaagtcatcgagttaagagcaggagaatccccttgactaggttggggtctgagcccagaggcagggcctaaggaggtgcagagactagggccgggagtggtgaggcaaggttggggcctggagggacagctatgaccgttgaacttgcagaccctggtccaccttcttggagtggaagccagcggtgcagaaggggacccctgaggcgcagaggcaagtaacagtgccaggggagtggtcagggcagatcctttccttctcaggaggctgttgagggggagagtgtcatgctctaaacagtgaagggacagatgacttccataccccactcttccttgctggtgagaagtggaccttggagttcagtggctgaaactcagaatttagggtatggagctggacccagagaataaagtctcaagtagtagaaggggcatctccttcagtccatggatttgggcctctggcatgaagcagccagggcctggatgttaaggatttagaattcagcgggagaggaagaacagggcttgtaaccagagtgagctcctcactctgcctccccatcctggggccgagagagcaggtggagttttctttgtagctgggcccggaggtagcggaggtcttgctgatcaagcccgtgagccaggcccaggtagagggtaaggaggaaagcaaggaggagacggtccgtgcccagggtaggcaccacccacagcactgtcagcagctccacacacactgggtggcgcaggtgggagaagagtctgagagcccggggagacttcagggccagaggctcgcccagccccagcacatggtagtatacctaagagagggagaagagcttagaaatggagtcaagcccttttctcatcttgggcacttctttcctcctcttccaggcaccacccttctagaactcaggcccaggaaccccccttctgagacttggatccctgatcctgacttctgatccatgtaccttccccaggcccaggaggcccatgcttgctgcccttacgagggaaagtcaaagggaagggccacgagggagaagcagggagacagtagaagagcatgggaggagggaaacccttgaaagggaacgaggagttctaaaacgggtcagaggtcataggtagggatctcggagcctcacctgtttgaggcccatgagctcagcatagtcaaagacgagaaggatgctaaagatgaggagccaggagatgacatggagcacaaagcagaggaggggcacccaggtggcccatggctcagcccgagcctcccacaacacagggcctttgggtatgggctcccagtaccgcatcaccagctgtggaaggataaggggctgggtatcccagtggcctagtctgcccgaccttgggagacccagacccagatctgcccccatcacaggctagcctgcaactctcccccacctctctcctaagcatcaccaccaaatattcaccatgtggagggtgcgtgctgggtgaggtcccaaagatgtaaggatggcctgtctctaccctgagaacttatagaatagatggggtgacctgatagctacgcaaagtagtagcctgtgccaaccacccagtgaaaagacagacaaggccttctcttcagacctagggaagtggttttgaagaaagggtaggactgaagagaagggatctcaagcaggacataaacaaagttgcagaggtgagaagcatatcttgtgcttagggaaggacaagtacacccttcttgataaaaagtaggatatgtgctgtggaggaatggaagctgagattagttcctcaattctcctcctgaacccatattttgcccctccaatccacggcacccctcccgcacttggtctcccttggggactcaactgccaggatttcatacctgcaaggccagggcctcatacctgcaaggccagggcagtgcaggccacatacagtgacctctgaaggaccccaaagtaccgggatgtccatgccttcactctttcagctgccatgaggctgtgctgcccaacaaatagaagcaggagccccagatcccatgccaggggggcaaggatgctgcggtcctgcagggcagccagccatccctggcgggcatctacaggaagttgagggaaaaagagacaaaagatcgaaacagtggcagaatgtttcccccaccctcatctcctcttggatccccaggccatgtcccttactgctttcaagagccttaatgcttcctctctaggctgtgcccatctcacttttccatccctagtttctgccctcttccctaggcctcctgcaaacctggggaagaggatttatagaacaacacatgttaggcagttgcaaaaagcatggctggagaggccacgctggattgcccctcttacttcggttctccaaatgctccttctttttaacactctcctctcaacagtcctctctacaaaacactttacttagaatactccggtcaccgcccttttcggctccctcagtcctcactctcccgcctctccaaaactctaatccttgagttcctaatttagaactcaggtctccctcccctgtagcttctcggccgctttcaaggttcgagttccctctcttggacttcccctgtcatttgtttccaagccccgccctcaatccctctcctacggctccaccttcctcctcccagttcatcctcgatccctcccgctcacccggaccaccagactccgggatccctccaagaagtggccgaagggaggtaaagcgcacgaactccactccggtgccaaaggccaggatgaaagaggcgagggcagcagggatcaggagcagtgcaggggccatggcgagaaatggaggggtggggaaaggggcggggtcgggattcccgctgccacaggccccgcccgcggccccgcccccggctgaatccagcccaggagggcggggctcctgcacgccaccgccaggcttccggcccgcctggcgcagccttccccatccagctgtggatccgttctgggatgcgtgtcccggcctgctgtctctccgtcacagaagggaatgttagaatcccgagagagagctgttaagggtagcggctctgcagccgctcacgtgggttgaatctcagctcgtctagttttcccatctaaaatgaaaagttactgttttaccacaaaataaattaatgtatggaatacattgtacagaatacaatatacagaataaattctgtaacttactataaagttgagttgttgactggccagttgctaagaatggcaaataacttctctgtaaatactgaaaggtttgttgtaatagtgccagagattgttgattagtaaccacgagaataaacatgttaaaatatttgtgatagtaacctttgtcagaattaaagatcatgcagctaaggaccttgtcacagtagacgtacacatagtagggaccttagatatcattagactaattccatcaacttatagatagaagaaacaggtccagagagataattgcctgagttaggaagctgctaatcctgtaggctaagggaccagataattgctgagcagcctctcgcaggctttacattccttctccgtctcctgggctcagtactcccaccctcctctgaatcaatgctgttgtatgctgtaccagacatcttatgttttcccttgaattcagtctccaccctgctttctgcttcagtaagttgtcccaaatggacggtatcaatgaaagtcacagtttttattgagaaagtcctctcgccgggcgcggtggctcacgcctgtaatcccagcagtttgggaggccgaggcgggtggatcacgaggtcaggagatcgagaccacggtgaaaccccgtctctactaaaaatacaaaaaaaattagccgggcgcggtggcgggcgcttgtagtcacagctgctcaggaggctgaggcagaagaatggcgtgaacccgggaggcagagcttgcagtgagccgagatcgcgccactgcactccagcctgggcgacagagcaagactccatctcaaaaaaaaaaaaaaaaaaaaaagaaaagaaaaaaaaaaaaagaaagtcctctctacacgactgctctgtcctcatctttttgagcttggaggtgatcacaacagagctgtgggtactaaggcactgcactattctttctgatttccctacaccctgcctacttctttgtaattatcactttattaaactctcccccaaattatcctaatttcactgtgctattcatttcctgctaggaccatgaatagagacacttaccacacaaagcaatgtgctacaagctatggggttcattggaagtgtaagaggccagactcggtggctcacgcctgtaatcccagcaattcgggaggctgaggtgggtggatcactttagaccagaagctggagaccagaatggccaacgtggtgaaaccccatttctactaaaaaattttaaaaattagctgggtgtggtggtatgcgcctgtaatcccagctacttgggaggctgaggcaggagaatccactgggtgatggagcaagattctgtctcaaacaaaaaaataaataaataaaatacaaggaagtgtaagaaaagatccctaatctctagatgtttaacctgaggcatttaaatagtaccactcatgaagagggagtgtagctgagtgctacatggtgctctacagacagcaggtatggtaagaaatcaaggtctctggctgggcacagtggctcacagctgtaatcccagcacttgggaggccgaggcagttggatcatctgaggtcaggagtttgagaccagcctggccaacatggtgaaacctcgtctccacttaaaagacaaaaattagccaggtgtggtggcaggagcctgtaatcccagcttctcgggaggctgaggcaggagaatcgcttgaacccgggaggtggaggttgcgataagctgagatctcgccactggactccagcctgggtgacagagtgagactccgtctcaaaaaaaaaaaaaaggagctgggcgcggtggctcatgcctgttatcccagcactatgggaggcctaggcgggtggatcacgaggtcaggggttagagaccagcctgaccaacatggcgaaaccccgtctctactaaaaatacaaaaattagccgggtgtggtggcacacacctgtagtcccaactacttgggaggctgaggcaggagaattgcttgaacctgggaggcggaggttgcagtaagccgagatcgcgccactgcactccagcctgggcaacagaacaagactccatctcaacaacaacaacaaaaaaaaaaggagccgggtgcagtggctcacgcctgtaatcccagcactttgcgaggccaaggtgggtggatcacctgaggtcgggagttcgagaccagcctgaccaacatggagaaaccctgtctctaccaaaaatacaaaattagctgggcgtggtggtgcatgcctgtaatcccagctactcagaaagctgaggcaggagaatcacttgaacccgagaggcggaggctgcagtgagccgagatcacgccattgaacccagcctgggcaacaagagtgaaactctgtctcaaaaaaaaaaaaaaaaaaaaatggaaagaaagaaatcagggcctccgggacatggacaattttagagtatgaaagctttgagttgtgcaaggggactaatatttatctgggtcatactgtctgccacccccacaatggctgtgcttaatgtatattatgagattagatatgtttaatagccagcaaaatgcttggcaaatctcatgctatttctactacaccaaagttttccaaacttaagtattacttacatgcagaaaagtgtacataagtaatcaactattttttaaaaattgaaattcatgcaacataaaattaaccttttttttttttgagttgcggtccaggctggagtgcagtggtatgatcacagctcactgcaacctcgaacttctgggcaaatggtcctcttgcctcagcctcctgagtagttgggactacaggcatgcgccaccacattcagctaactttttattttttgtagtgatggggtctcactatgatacccaggttggtctcaaactccttggctcaagtgatcctgctgccttagcctcccagggtgccaccatgccttgcctaaccactttattgtatttatttatttatttatttttgagacagagtttcgctcttattgcccaggctggagtgcaatggcgcgatcttggctcactgcaacctccgcctcttgggttcatgtgattctcctgcctcagcctcccaagtagctgggattacaggcgcccaccaccacatctggccaatttttgtatttttaatagagatagggtttcaccatgttggccaggctagtctcaatcaaactcctgacctcaggtgatccacccaccttggcctcccacagtgctgggattacaggcgtgagccaccacacccggcctagcctaaccactttaaagagaataatataatggtatttagtacattagtatattagtaataggtacaaccaccacctctatctaatttcaaaacatttttttttttgagatggagctttgctcttattgcccatgctggagtgcaatggctgatctccgctcactgcaacctctgccacccaggttcaagcaattctcctgctcagcctcccaagtagctgggattacaggcatgtgccaccacgcctggctaattttgtatttttagtagtgacagggtttcaccatgttggtccagctagtctcgaactcctgacctcaagtgatccacctgccccagcctcccaaagtgctgggattacaggcatgagccaccacgctgggccttcaaaacattttcatcacccccaaataaaactccatacccatgaagttactccccattttctcatctcccccaccccacagccactggcaaccacaaatctgctcttgttctctatgggtttacctattctggatattccttacatgtgtaatcacataatatgtgttctgtttctggctttccttcacttagcaaaatattttgatattcatcctcaaaatattgtagcatatatcagtatttcatccttttctatggttgaataatatttgattatatggatatatcacaattgtttatccactcatttgctgatgaatatttgtgttgtttccacctttttggctattgtaaaaagtgctgatatgaacactcacgtacaagaatttgtttgaataactgttttcttttcctttttttttttttttttttttggagacagagtcgtgctctgttacccaggctggaatgtagttgcacaatcatggctcattgcagccttgacctcctcccacctcagcattccaagtagctgggattacaggcatgtgccaccacacctggctaaattttttttttttttttgagagagagtctttctctgtcacccaggctggagtgcagtggcatgatctcagctcactgcaacctctgcttcccgggttcacgtgattctgcagcctcagcctccccagtagctgggattacagccacatgccaccatgcccagctaatttttttattattattattattattttttgagacagagtctccctctatagccaggctcgagtgcagtggcatgatcttggctcactgcaaactctgactctctggttcaagtgattcttctgcctcagcctcacgagtagctgggactacaggcgcacgccaccacgcccagctaatttttgtatttttagtagagagggggtttcaccatgttggacaggatggtcttgatctcctgacctcatgatccacccgcctcagcctcccaaagtgttgggattacaggcgtgagccaccaggcccagttaatttttttttttttttagacggagttttgctcttgttgcaacggcatgatcttggctcaccacaatctccacctcccaggttcaagtgattctcctgcctcagcctccggagtagctgggattaccggcatgcaccaccacgcccagctaattttgtattttttagtagagacgggtttctccatgttggtcaggctggtatcgaactcctgacctcaggtgatccaaccaccttcggcctcccaaaatgctgggattacaggcatgagccaccacacccggctaatttttgtattttttagtagagatggggttttgccatgttggccaggctcgtcttgaactcctgacctcaggtgatctacccaccttgcctcccaaagtgctaggattataggcgtgagccaccgcacctagcccatttttgtattttttgtagtgacagggttttgccatgttgcccagactggttgcccgtgaagtcctgggctcatgcaatcctcccactttggcctcccaaactgctgggattataggcataagccaccccacccagcctggacacctgatttaaattcttttgggtgtacacctaggagcagaattgctggactgttcggtaattccgtatttaactttcttttttttcctccaatttgagagcaggtactgcttaagtgcttagattagaaaaacaatcacagtagacaccttagctcattcttctaataagtctgttgatccggttctccctgttgccagcatgtccactttctacaaaatgggtggtctttttctttactctaccttgtggagaggataatttgaagggctacaggaagttatttgcttctttgaagcattttccaacagtatagatctcaagaatcagatcctccatgcaggtgatgccatatttaccaagagataaagcaatcaaagtgtcatctgtcaaagcaatttgcttcttattgatttttgccataaccatgctggtagattagttcatttactgacttcagctttgggtacccccatgccatatatggttctacaatcctcagcatgttcattgaagccttgttgagcttcacaaaggttccactgaagatttaacaaaggcgaagaagctgcaacacctttcggacctttgggttcacaccactgatacctctgatcctgatgacaaacggcaatttgggttttgcaggtacatagaagttgccagcttttctggccatcctagccattcgaatttcagttctgtacatctgcctatattccttgtgatagtgcttcactttttcatagataagcttcctccttgccttttgaatcatcttttgggcaaatttctttctcgggcctttgatcttcagctctgggaaattccttcgctttttaagggtttctggcatagcaagaacctccttctttttctctctctttttttttttaagacggggtcttgctctgtctcccatgctggagtgcaatggtgcgatctcgactcaatgcaacctccccctcctgcattcaagcaattctcctgcctcagcctcctgagtagctgggatcacaggggctggccaccatgcccggctaattttgttttgaatttttagtagagacggggttttgtcatgttggccagcctggtcttgaactcctgacctcaggtgacctgcccacctcggcctcccaaagtgttgggattacaggtgtgagccactgcaccccggccctctccttcttatctacaacactctacatgagggttccagccagaaaagaggctacttttttttgtttgttttttttttgagagggagtctcgctctgtcgccaggctggagtacagtggagcagtcttggctcactgcaacctccacctcccgggttcaagcgattctcctgcctcagcctcccgagtagctaggactacaggcgcctgccaccacgcctagctaattttttgtatttttagtagagacggggtttctccatgttagccaggatggtctcaatctcctgatcttgtgatctgcccaccttggcctcccaaagtgctaggattacaggggtgagccaccacgcctggcctttttttttttagatggagtcttgttctgttgcccaggctggagtgcagtggcacgatctcagctcactgcaacctccacttcccgggttccagcaattcttctgcctcagcctcccaagtagctgggattgcaggcacatgccaccacgcccggctaatttttgtattttaagtagagacgggatttcaccatgttggccaggctggtctctaactcctgacctcaggtgatccacctgtcttgacttcccaaagtgctgggattacaggcatgagctgccgtgactggccttttatttttttgagacaaggtctcactctgttgcccaggctgaagtgcagtggctcgtgtccacccactgcagccttgacctcctgggctcaaacgattttcctcttagcctcccaagtagctgggaccgtagtgtgtgccaccatgcccagtgaatttttgtatttttggtagagacgaggttttgtcatgttgcccggctggccgtgaacttctgagctcaagtgatctgccagccttggcctccaaagtgctgggattacatgtgtgagccactgtgcccatccatatgtttaactttttgaggaaccatcaaactgtttaccgcagaggctgaaccatttaacattcctaccagcaatgtataaggattctaatttctccacatccttgtaatcaaccaacttttaaaatttaaatctggctgggcacggtggctcaagcctgtaatcccagcacttttggaggctgaggtgggtggctcacttgaggtcacgagttagagaccagcttgggcaacatgacaaaacctcgtctctaccaaaaatacaaaattcatcgggcatggttgcacacacctatggtcccagctacttgggaggctgagaggaaaatcgtttgagcccaggaggtcaaggctgcagtaagccgacatcgagccactgcacttcagcctgggcaacagagtgacaccttgactcaaaaagataaaaggccagtcatggcggctcatgcctgttatcccagcactttgggaagtcaagacaggtggatcacctgaggtcaggagttcgagaccagcatggccaacatggtgaaaccccgtctctactacaaatacaaaaattagccgggtgtggtggcatgtgcctgtaatcccagctactcgggaggctgaggtgggtggatcacttgaggtcagaagttagagaccagcctgggcaacatgacaaaacctcatctctaccaaaaatacaaaaatttagtagagccccgtctctactaaacaataaaaaaaagaaaattagccaggcatggtggtgtgtgcctgcagtcctagctactcaggaggctgaggtgggactattgcttgaactgggaggtggaggttgcagtgagccaagatggtgccactgcactccagcctaggtgacagagatgagaccctgtctcaagaaaaaaaaaaaaatcttaagaaatgtcatacaaattgtcctaaatagaagataatgatgaattaaatacaagtctatgacttttttttttttaagtttgtgtcttgagacctagacattttaaaaaactacactacaccataaggcacagagtgaatatttatttatcacagaggtcaagccgaagctctaattttataaatcctggaaaagctggccagaaaagtacagagacttgcccaaagtcaaagctaaagatgcttccagaggccaggagagaagaaaatgttttagtagcactccataactggaccctcaaatctactcactccaagcatcccttcaagttcctgaccccaaagtaagaatctcagtaagaaaaaaatagagatggtttccaaataggaggtaggacaccatgagtggcatcgagcaataactgcaacagtctggctaaagatagctgccacttatgacatctgagcatgaaactagctaattttaaaatggccatttaatacatgcatgtaagaaatcttgtatcccctaaatctatacaaataaaaaactataaatacaaataaaataaaatggccattaaaaaaacaaacaaacaaacaaaaaacaacctgtggcttccaaatcccttatcttttcatttattcataaagatttctggtcccacccatgttccaggacaagttgtatcaatataccccaatcctttctaacgccctgagttctttcttccacatatcttctaattcgtggtctgggagggaaaagggtagtggagttctcaggtggatgacatctccaaaggggagaggacaaaggcctctggcttggcttcctgcttcagcactccagtcagcaggaactcaggcgagaggaggggcagcccaacccgtagtggaatggagcaatgagggaagtcctgagggcatgtgatcacaactctctgaggctggggaagacagagcaaaggcaaaatcaggtgaaaaagaatcctagaaatgggttcaggacccactaaccagtcttagcatcactaaaataatacctcctaatatgaagccaagtgaagcacaccgcatactgtctatgaaatactcttgctaggccgggcgcagtggctcatgcctgtaattacacagcactttgggaggctgaggcgggtggatcacgaggtcaggagatcaagaccacggtgaaaccctgtctctactaaaaatacaaaaaaaaaaaaaaaaaaaaaaaaaattagccgggcgcgctgacgggtgcctgtcgtcccagctactcgggaggctggggcaggagaatggcgtgaaaacccaggaggcggagcttgcagtgagccgagatcgcgccactgcactccagcctgggctacagagcaagactccatctcaaaagaaaaaaaaaagaaaaaaaaaaaaagaaatactcttgctagaggccaggcacagtggctcacgcctataatcccagcactttgggaggccgaggtgggtggatcacgaggtcaagagatcgagaccatcctggccaacatggtgaaaccccgtctttagtaaaaataaaaaaattagctgggcgtggtggtgtgcgcctgtagtcccagctactcaggaggttgaggcaggagaacagcttgaacccgggagatggaggttgcagtgagccaagactgctccactgtactccagcctggcgacagagtgagactctctcaaaaaaaaaaaatacttttgctagaaagatgaacctgaatttattcaagcttttacaattatctgcaatttccaggaaatatggagtacagaggaacaagataaattatatgacaaggaggcaaacccaaaattccagactgaggaacattctaaaggacaagtgacccagcttctgcatgaaatagatggctgggtgggttaagggatgctctagagtaaagataattaagaagataataggtgtggcagtatgtggaccttatttgaatcctgatttgaacaactgtatagagacatttttcagacaatgggagaaattttattaatggagtgtgagcaaatgaccaataaactactgttaattttgcttaggatcaataatggcattgtgattatgaaataaaatgtacgtatttcttagagatatatatttaagtatgtaggaagaaataatataatattggcagtttgctttaaaatatttcagcaaagaaagagaaaggaaaaaaagaaagaataaagaaaaataaaaagaaatgaaatacttcagcaaagaaaatcaaaggaaaaagccgggcgcggtggctcacgcctgtaatcccagcactttgagaggccgaggcgggcagatcatgacctcaggagatcaagaccatcctggctaacacagtgaaaccccatctctactaaaaatacaaaagaattagccgggcgtggtggcgggcacctgtagtcccagctactcgggaggctgaggcaggagaatggcgtgaacccaggaggcggagattgtagtgagccgagattgtgccactgcactccagcctgagagtgagactccatctcaaaaaaaaaaaaaaaagaaaatcaaaggaaaaaagggatagatggagcaaatgtagcataatctaaattaagctgctgctgaatctcggtgattgttatatgggggtatcagcagatctgtcccctcattcctatccctttctataccataggtcttttcccccaccctctcactactttatattcctttctgaacctccatttttttccctccaatctttgccattccagccacctctttaactgccactgccacctcacccagacccagaacatcctaagcataccttataggaccgaggcatgctgggtaggtatgtgcctccacagcagctaataatctctcccatctgaggtggtggtggctggactccaggggtcacatagatctcatagccctaagagaaagaaatgatggagatggtattgtagattgggaagcactggagggagggctgaagcacaggttaaaagatagcctctcacctctagcagccttcgctcccgagccctgctcagtgcgtcttgaaggctaaagccaaagttcttctcttgctcagggtcggtcaccacatattcatccgggggtaagaagaaaccagccttgcgggactaaggacggcagcagtcagcatcaaagctcagcccagcccctcaatcagctctgctgcctagcatttagagagagctcacaaaatgtcttttaaatcaatgcaggcttctggctcaccaatgcccctgtcttcctgtaacgcctcttcccttccaccactttctagggcactatatgagcagtcttgccactatatcggtctgtcatcatcccttggcctctcacctgatgcagccagtccagggacagaatggggattccccgccccagggcacacaggaacttgactgtccggcggatgcgatcagtgaccaggtgggaagcctctgccgctgaaccagccagacttccccccagtgccagcacagcccgctctccccgagcatccaccactcctgtgaagagcacctgtggaagggttgacctgaggtggttacggcaacccatgccatcagcacccatctctacaatcctctaggtctccttgcatcctcccctcatctctgtctcccacaaagtcccatgcctttgtctcttactttgggggctgttgattcttggttaagtttggtccgtcggaggctgcggcttggtattctgttgggctcctcctctgcctggtctctctttctcttgcctggttttggagtcacgacatcctgagattgagaaaaatcttggtgggagtttcagagccctgaagtcatttttcccagctttgtggtcccaaccctctcctcacctcttccttccctggcttctctgcagtatcttcttcctcttccttgataatcactgtcttctgggagacttcccctctttggggctgtttttgatgtggtggtgaatccatggtagctaaagacctcttgcggctttgagaggccttaggctggagctccggggtgaacctagatctacctgctggttccaccttttggatctgggaggcatgaattggtgtctcaagaagctggggagaggcaggctcaggaatggctgtaagggattcagctgctctcactgctccccatctttggttccttgaggcctgggatttaggttccaagggtgcagagcaaggcttatggtcaatgggagctgcgagggagccagggttcccagcggctctctgcctcttgatgcaactgggttgagtaataggctcaggggaaataggctggtctgtggtgacaggagattggaattcaggggtggtaggaaccggcatagctcttactgtggaagacctcagtgttttgctctgaccaccctgagctatggcctcaggggtgacggactggtctgtgggggtaaaaggctcaagatcagaggctgctggttcaactggtttgggagtcttgacagaggacctatttgtctttctcctagtggccctagatgtgagcttgggggtgacaggctggtctgtggaggtggtaggatggggctcaggggctgtggggacaactggctcaggggtcttgacagaggacctatttgtcctgcacctagtggcccgagatgtgggctcaggggtgacaagctggtttctggaggtggaaggctgaagctcaggggctatagggacaattgattcaggggtcttgacagaggacctatttgtcctgcccctagtggcccgagatgtgggctcaggggtgacaggttggtctgtggaggtgggaggctggagctcaggggctgcgggcacaactgtttcaggggtcttgacagaggaccgattttttcttcccctagtggtccgagatgtgggatcagaggtgacaggctggtctgtggaggcggaagcctgtagctcaggggctgtggggacaactgtttcaggagtcttgacagaggatctatctgttcttcccctagtagcctgagacgtaggctcaggggtaacaggctggtctgtggaggtggaaggctggagctcaggggctgtggggacaactgtttcaggggtcttcacagaggacctatttgtcctgcccctggtggcctgagatgtgggctcaggagtgacaggttggtctgtggaagtggaaggctcgagcttaggggctgtggggacaagtgtttcaggggtcttgccagaggatctattttttcttcccctagtagcccgagatgtgggctcaggggtgacaggctgctctgtggaggtggaaggtgggagctcaggggctatagggacagttgattcagggttcttcacagaggacatatttgtcctgctcctagtggtccgagatgtgggcttaggggtgacaggttggtctgtggaggtggaaatctggagctcaggggctgtggggacaactgtttcaggggtcttgacagaggacatatttgtcctgctcctagtggtccgagatgtgggcttgggggtgacaggtcggtctgtggaggtggaaggccggagctcaggggctgtgggcacaactggttcaggggtcttgacagaggatctattttttcttcccctagtagcctgatatgtgggctcagaagtgacaggctggtctgtggaggtggaaggctggagctcaggggctgtggggacaactggttcaggggtcttgacagaggatctattttttcttcccctagtagcctgagaggtgggttcagaggtgacaggtcggtcggtggaggtggaaggctggagctcaagggctgtgggcacaactgtttcaggggtcttgacagaggatctactttttcttcccctagtaacctgagatgtgggctcagaggtgacaggctggtctgtggaggtggaaggctggagctcaggggctgtggggacaactggttcaggggtcttgacagaggacctatttgtcctgctcctagtggcctgagatgtgggcttgggagtgactggctgggctgtggaggtggaagggtggggctcaggggcagcagaggtagctggaaagggtgtcattctggaggacttccgagttctaattttaggctttgggtggaaaggctccagctctgaggacaagggagcctctggagcttcctgactcccatcttgcctggtcttacgaacggttggcttgatagaaggtaaaaggggagaaagaaggggcggaggtgcaagatgtttctggctctgagagttaaggggcttttggggtggggctggggcttcaggtactgtaggaggcagacaagcatctggagattcctgatcgccctagggagaaacagaagcaagtgagggggaggaggtggagaaaagagatagaacttggatactgttcttgatacttgtttatggttagataggcttaccagatttccaccgggcgtggtggctcacggctataatcccagcactttgggaggctgagacgggcggatcacgaggtcaggagttcaagaccagcctggccaacatagtgaaaccccgtctctactaaaaatacaaaaaaaaaggccaggcatggtggctgatgcctgtaatcccagcactttgggaggccgaggcgggtggatcacaaggtcaggaaaccgagaccatcctggctaacacggtgaaaccccgtctctactaaaaaatacaaaaaattagccgggcgtggtggcgggcgcctgtagtcccagctacttggaaggctgaggcaggagaatggcgtgaactcgggaggcggagcttgcagtgagccgagatggcgccactgcactccagcctgggggacagagcaagactctgtccaaaaaaaaaaaaaaaaaaaaaaaaattagctaggtgtgttggcaggcgcctagtagtcccagctacctgggaggctgagggaggagagtcgcttgaacccgggaggcagaggttgcagtgagccaagatcgcgccactgcactccagcctgggtgacagagtgagactgtctcaaaaaaaacaaaaaaatacacaaaaattagccgggtgacatgcgcctgtagtcccagctacttgggaggctgcggcaggaaaattgtttgaacccaagagacggaggttacagtaagctgagatcacgccactgcacactccagcctgggtgacagagacagactctgtctcaaaaaagaacaaaaacaaaaaatatgctcactggattttcctttctgtctatgatctctcctccattagactgggatctacctgggaagctacctttttcccacagacctgtctccataatgctactatagtgttctccacacgtggatgatggtaaggaaaaggatggctggggcaaagaaagaagaaacacgaagggtctttcttttgagtcaggtaggagatacaacttaggaaacagatatggaaaacaacgggtgccgaggataaaggaatagaagccaatcaaggcgtgacaaaaatggaagaaaactgaataatgagaaaggaatagattaaagtgaggctaggtgaaagagcattggagaagatatagagatgacttgtggaataggaggtagaaaaagtagctctcaccctggaaaccttctcagcagctctgatcctggaagccttctcagcaggtggcatcttgcaattcaggaggcctagacagaaagtaaacacaaaggtggctgagttccaagcagctggttgcccaggggttgattatcacgaggcctgtgtatcaccttgggttcccctctgccttcacttacctttctgatgcctcctggggctcactggggatccccttccacctgactggctcccagaaggtacgggggctgaggtaggtcccggaaggtcccccgcccccaccccaggctctggtgttgggctggaggcctgccctttctggtcctggctccctccctctggctcccctctctgtgtatctctctccaggatcactttgggcaccttctcttctaactcggctggatcgcactctctgtttgctactggtctctctacttctctctcaaatgctttgcttggaagggtctgcttctgtacttgtttctcttgtatttcctcagatgtctcaatttctaccttcaaactctccctatctctttcaggacttgcactttccccatttttgtcagattcttgtctctgggtgtctctagctaacaactgtttttgttctctgtcctgtttccccttggttaattcttcctctcctgtcacatctgtctgtctttctggtagcagtttctcagtttctctctccaatggccctctctcagggcccaccctctctgctgtttcttttggtatacccatgactttatccacagtctgcctccctctgccttgaatccccattggctctgtgtgaactgggctctctggatgttggtctcctggtattgccctaggtggagacaggcaaggtccataggcctcaaggtgcgtgtcaaaaggctgggtctcagagtcctcagactctctcagacagaatggctgtgtagccaggacctcccatggttcatctagggtacctggaaggggaggaaggaagagagagagagggagagggagagaaaagagggagaggaagagggaaagggaagtacaggttgacataataaatatgatgagaaaggatttagataaactcatgaataataaatctgaacaggttattaaaggtaagctgggaataagggtggtagttataacatttaacgtttgtctcaaaaaggtcatagccttaggcgggcatggtggctcagacatgtaatcccaggactttgggaggccaagacatgaggattgcttgaggccaggagtttgagactagcctggacaacatggcaaaaccccatctctacaaaaaatacaaaaaaattaggtgtggggacggggacctgtagtcctgtagtctcagctacccgggaggctgaggtaggagaactacttgaaccccaaaggtcaagactgtagtgagctgtgatcataccactgcacttcagcctgagtgacagagactctgtctcaaaaaaaaaaaaaaaaaaaaacccaagagaaaaagaaaaacatcatagcctaatatgagttccctgaatagtctctcatcataccactgcattccagcctgagtgacagagaccctgtctgaaaaaaagaaagaaagaaagaaagaaagaaaaacatcatagcctaataagagagttccctgaatagtctctctctctcaagacagtttcactctgtcacccaggctggagtgcagtggcatgatgttggctcactgcaactcgcaactgctgggctcaggagatcctcccacctcagcctcccaagtagctgggactacggcatgtgccaaagtgcccggctaattttttgtatttgttgtagagatggggtttggtcttgaactcttagactcaagtgatccacccacattggtctcccaaagtgctgggattacaggtgtgagccaccatgcttggctggaatttccttctttttaaaggctgaatagtattccactgtgtatatataccacattttcttttttcttcattgacacataataattgtacatatttatggggtacctgtgctattttgactcatgcatacaatgtacaatgataaaaccaagataattgggatatccactatctcaaacatttatcatttctttgtcttggaaacatatcaaatctcttctagctattttgaaatacacaataaattattaactatagtaacactactgtggaactgaacactagaacttattcattcaatctgactggatttttgtattcattaaccaacctctttatgcattctgtccctctacccttcctagcctttggtaaccaccattctactctctacttccatgagatccatgtttttagctcccacatgagtgagcatacaatatttgcctttctgtgctgacttatttcacttaacataatgtcctcagggttcatccatgttgctgcagatgacaggatttcattctcttctgttgctgaatactgttccactgtgtatatatacacattttcttttttttttagattgagtcttgctctgtcacccagtttggagtgcagtggcatgacctcagctcactgcaacctctgcgtcttaggcagcaatcctcccatcttagcctcccgagtagctaagactacaggtgcatgccaccatgcccagctaaattttgtattttgagccactgcacccagcctatatacacattttctttttttttattattagagatgaagtctcactctgttgcccatgttggagtgcagtggtgtgaccttggctcactgcaacctctgcctctggggttcaaatgagtctcctgcttcagtctcccgagtagctgggactacaggcacctgccaccatgcccagctaatttttgtatttttagtagagacagggtttcaccatgttggccaggctggtctcaaactcctgacctcatgtgatccacccacttcggcttcccaaagtgctgggattacaggcatgaggcactgtgcccggcctacattttcttttctttcgtttttttgagacagagtttcactcttgttgcccaggccagagtgcgatggcacaatctcagctcactgcaacctctgcctcctgggttcaagggattctcctgactcagtctcctgagtagctgggattacaggcatgcaccaccacacccggctaattttgtatttttagtagagacggggtttctccacgttggtcaggctggtctcaagctcccgatctcaggtgatctgcctgccttggcctcccaaagtgttgggattagaggtgtgagccactgtgcccgaccccggcctacattttctttatccattcatctgttgatggacatttagtttgatttcatatctgcctattgtgaacagtgctgcaatagtgtgtgtgtgttttttttaagagacattgggggtgggggttgagggatgggctattgcccagactgggctcaactgatcttcccatcctggcctcccatgtaactgggactacaggtgctcactactatgctgggctaattttttcatttttgtggagaccaggtctctctctgttgcccaggccagtccctaaatattttcaacctgcagctggttgaattcacggacgcaaactcgcatacacagagggctcactgtaatcagagtatgaaagaaacatgtaggaaggcaaatcaagaaagaacgcaggccgggcgcagtggcttacgcctgcaattccagcattttgggaggccgaggcaggcggatcacttgaggtcgggagtttgtgaccagcctggccaacatggtgaaaccctgtctctactaaacatacaaaaaattagccaggcatggtcatggacagctgtaatcccagctacctgggaagctgaaggaagagaaaccgcctgggaggcggaggttacagtgagccgagactgcaccactgtaatccagcctgagtgacagaggaaaaaaaagagaatgcagaattggggacacagaggagggaagagtttcttatacctgttgtctggaagctgcaatgggaagggccaagctcttggggtggagtcaacatgaaggcctgggtaggttcatcctccatgctctggactgctgtacaggaaaagatggcctaagttcatctcctccatactactgtagggttccattcctggtctcctaccctacccatactagcctttacccttcaaggaccaccagtctaatctcccagctcccactggtacaggattcaaataacacagaagtcctcaccttccaggccctgattctccagaaagcactgggtagcttgtaggtccagatcttcagaatctggtcggggaggaatataagacagtttaaaacaaaaatcatacctgacactaaactccttaaataatctctacctttctctccccaaccccagctgttagaaccctggttgatttcagaggtcaaggaaggaaggccagcacttaccaccatagttgtcttcagagtccttggtcccacccacatgttgttctctctcccttcctgtggggacctgggctccctctctctgtggctgggtggattcccctagagtgtctgtgtccaccaccagatctgtgaggttctctcttgagatagggaggtcctgctccacttgtgccacaggtggcccaccctgggcccccacctcatgagctctctcctgcttaagaacagctgcagcccactctgccccagcatccccttctgctggaagctggctctttcttacatctgcaactactgaggctgttagggcggtgccctcctctgcatctgtttcacagtccccatgcagaggccaggcttcctctagagataccacaagcagctttgctggtcccccaactgctttcacatctgtttgatttgtcccctccacagacacctgatgcttctttatatgtataatggctgaccctggcgggacttccttctccacttgtgtgttgatgtccactgtggtggaggcttggcttctctccaggtggatcccaggtgagctcttatctgcttccacactgtcatcactgtccccaaaaggaggttggtccttttctgaatgtgctctaacaagggctctaatctttgtgtgatccttgaggacagcttctctattttccactgggagctcttcctcctccacgtctgtgtcactgtctctctcagtggtggtttggcttcgctgcagaaggaccacacgttggggcatgtcctcttctgcatctctgttccatatagcaggctggctctctttcagatgtgccaaagtcagcgctgctgagacttcttcctcgtcatctgtatcgctgttgataaccatggaagcttggcttttctccagagggacagcctgtggggccttgccttcttccacatctgtatcactaccagcctggctctcctgcagatgggccaggcctggtgctccagggccccttgtacctactccatggaagatcttcctcttcttcataggaatgacaactggggttgctgggatcctctcttcttccgcatcagtgtcgctgtcgatgaagccaaaaggctgagccctttccaaatggacctcagctggccttccaggaggcctgctgtcatcatccacatctgtgtcactgtcctctccaggaggttggctcctctccagaatcaccccagctggaaccaccccattccctgcacccctcttgacttttgtatcattgtccctctccttcactaaaggctgatccttttcaagctggatttcagttacaactttagcttcagactgctttgcctctacagtggcacctcttctggcagctgaggaggcctcctctgtggctggttgctgaccttcttccacatctgtgtcactgttcaaattgaaggcaaaaggcggcccaaggccgcccaggaccggggaatgcccctcttcatcactgtgaagggaagaaaagagagtctatagaatttatttccctggaagggataccccaactcaactgtgagctccttgaggggagacacaaggtagcatatttcttcttctgtttccaatttgttttccacttggcacatcagatgtgctccataaaaattcagctgagtgaatgaatatgtatggttccccagccccaactctcatgataatcatctcttttagagattgatcctccagcccctggttcttcctcattttgaagactcaggtgtctgactctttggcactcacctctctggaactatcacagaggaagatgtggtccttgatttttttaccatacgcctttcagaaagaaaatctgtcaagaacagaaaggaatgagttgacaattgtacactcattattcctgtctcctcattctccctgccaatatacaaacttacctacttcctcctccgagtcctcagccaacagaagcctctggggttgagtttctccctgtactctgggtgtctcttctactgtcagagggccccgggagacaaagggcagagagacatccaggcgatggtactggcagagcaagtcagcaaagagaatcaattcctggtccctcagacggtgactcaccccagggctcaaaaccttaggaggtctcaggatttgagtaccattaaggctcccacagtctcggaggataggtgccttgtcccaggctaagatttcaatctctgcatgttgtttggagatagatggaaagggcagggccacagagcagtcaggcattcggcctaccacattcttcccgaggtgtagtgggaaatctaagaattagagaggtagataagctccaagatcagagtcctggcctgtcattaggaaaaagtgcctattaggtactctactactcactcaaggcctccatatgcattagaaaaataaaaggccctaggacatctaggcactgaaagagtatatgcgataccccatccatccacaatggatgtttttttactgttataaaatacacataacacaaaatgtatcaccttaataattttaagtgtatagttcagtggcattaagtgcattcacactgttgtgcaatcatcactaccatccatctccagagcacacaattggattttatttgattttttttttttttttgagacagggtctcattctgtcacccaggctagaatgcagtgtcatgatcatagatcagtgcaatcttgaactcttgggttcaagtgatcatctggctcagcctcccaagtaggtgggactgcagatgtgaaatgaaccaccacacctggctaatttttaaatttttcgtagagacagggttttgctatgctacccaggctggtctctaactcctagtctcaagtgatccttctgccttggcctctcaaagcacgggaattacaggtgtgagtcactgcacccagcttcatttcaatctcttaattttcttttatcaaagtaaaatcacttccagtgagtccagggtagtagtctgcaactatcaactcaatcggccccatctcttccattcatgaaaaaaaaaaattcacatctcattgaaacatacataagcttcttgcaaccctccaaataccttaccacaaaaataaaagatctatatcaatacttgaacatccaataccctctgacctttttctggtccatgggcaccactaaagatatgtagccgccctactggctccacgttacacctcaaggattcactggattgctctgtctcctcctcttcttcaacatcccagtcaatagcctgggtgtcctccatgatctgggaaggatacacattatcaattatcctcattattggttcacacaaacagcatcagagttatcagactgaaaactagggggtaaactggatcattatgaacgttgatgcttctctttccaccaatctttctgttgttaaccttctgaagcacttaaaacatttttttcttttttgtgatggagtctcgttctgctccccaggctggcatgcagtggtaagatcttgggcccacggcaacctctgcctcccgggtttcaagcaattctctcacctcagcctcccaagtagctgagattacaggcacctgccaccatgcctggctaatttttgtatttttagaagagatggggttttgccatattggccagggtggactcgaactcttgaccttgggtgatccgcccaccttggcctcccaaagtgctgggattacaggcgtgagccactgcgccccgttgtttttctttcttttttagcccatgctttttatacttttaccagaccacctcagtttgatcagatgcaactgcaaaaaatgataataaaagatgacatatatagaagcttcctatgtgtcaagcactgttctaattactttatatcgactctgactcatttaatcttcacaagaaccttgtaaagtagtattactatcttccatttcttcagataaagaaactgcaacatagctgggttaagattttcagatctccttgaaacatacataagcatatataaggttaagacttgccccaaatcactcagatgtctctcctctaaaatcttgatggtttttcgtgcacacagaataaaatctaaactccttagcgagaccctccatgatctgaacttcacatcttgtaacgcctacccctcgcccgcaaaagcctatggttcagccagacattttccccagtcttcgaacacactgttcttgtcttcccacatcttcatgccttagcccaattccttggctttttcccacctagttttctggtccaacttctaccatcctttaagattcagttcaaatgtcactttctttcttttttttttttttgagatggaatctcgctctgtcgtccaggctggactgcagtggtgctatcttggctcactgcaacctctgcctccaggcttcaagcgattctcctgcctcagcctcccgagcagctgggattacaggcgcccggcatcacgcctggctaatttttgtatttttagtagagacggggtttcaccacggtctcgagctcctgacctcaggtgatccgcccaccttggccacccaaagtgttgggattacagcagtgagcaaccgcgcccggcctcaaatgtcactttctcagcaaaccctttcctggcgtgttccctgccttctcgtgttcctggtgtatcctgcctgttccacagtggtcaatggatttgtgcttactctaagatctctcgctatattgtaaccattactttccatttctgccttcacactcacccacctccaggactggattaggggaaccgtgtctttcccctagggtccatcatattcattcaatggttatggtatacctgtttgaagtatttggtatacatctgtgaaccaaacatgaaatcgaccctgccctcgggaaggctcatcaccgagcctactgatgaaggaacaaatgagatggaaagaaaatagcataaatggaattcacctgaaaatatgccactctagagggaaactgttgacaggtagggaaagtaggatgccccatggataaagtgtcaactccgtctttatgacaggccaactcagcgggtgcccaccacgcttggctccaattcaaagagccaccatctttggtccccacctcagtgggttcccttgtggcccgacgtctccctgtgtcttcatacctaaactcggagcggggcgccaggtaaggatgagtattacagtccgagaagcgaacttccaagtcacctccgcccagtcgcacccaaggtacgcccctcccgccttctgggggaaccaagatggctcccggggagccgtgggccaggcccctagaactcacctactttaagtccccgcgcgcgccaccagtaacggtcgcgacccgggtggagcgactgcgtgtgccgaaaaagagcttatttgctgattggcttctgccgctgtctttcacaaccgcagccagtcgagcggaggcacacccaaagccccgcccccttagagttcaaataggtggtgtctcccaggctgctgagatcagttaatgagacggtaattgaaggccgccgtgcgccaacagaataatgcacgtcgattgggcagctccaagggacaacccactaccgcttgcccgcccaccacccacttcccgcgcagttccaaaccgcgaccagagagtctggcgccagctgccggcaacggatagaggggctgtgtcatagacgtccgacgtgtctggtaaggccagagcgcctttcctcggtcctcctagacatggtgtccgctgactcatgagaaatgaaagtgggttgcgcgttgcagtcgtggctggaggctgcagtttggagaacagcccgtaggcgtggcagttcactcctgttgcattggaatttcatttccttttgatttggtttgtagtagaagtaatatctttcttcctgggaatacgtctctgacggacattttgaggtcattttcttaaatccaagatcctaaagatctgtagtcgaacagagaaaactggtttgctctctgtcttaaaggctgtccccacctttcgaggggcgagggaaggatcataaaatcatttatttttattttttaattaactaatttatctattttttgagatggagttttgctcttgttgcccaggctggagtgcaatggcgcgatctcgactcaccgcaacctctgcctcccaggttcaagcgattctcctgcctcaacctcccaagtagctgggattacaggcatgcgccaccacgcccagcttatttttgtatttttagtagagacgtggtttctccatgttggtcaggctggtctcgaacttctgacctcaggtgatccgcccgcctcggcctctcaaagtggtgggattacaggcgtaaaccaccgcatgcggccatctatattttattttttgagacggactttcgctcttgttgcctaggctggagtgcaatggcgcgatctcgactcaccgcaacctccgccttctgggttcaagcaattctcctgtctcagcctcccgagtagctgggattacaggcatgcgctaccacgcccggctaattttgtatttttagtagagacggggtttctccatgttggtcagtctggtctcaaactccggacctcaggtgattctcccgcctgggcctcccaatgtgctgggattacaggcgtaagccactgcgcccggcctattttatctcacaataagacatgaagaaaatggtaactataacacttgcataattcataaagtcctttctgttggttatctcaattctgtgcacaacagtcaaataagcagattttacaaacgaggagctggagccctgcaaagttaaaggactttcctaggatcctacagctaatatagagacaaattgaaacaagttatctgattgtgtattttgagttatttctactcccacaaaatgactgtgttcatttccctaaaacgtaaagcattatattttaagtgggtagagagggcttacacaagttgatgttccctcatttagaaggcaacttagaaatacattgatctgcccagcgcggtgctcacgcctgtaatcccagcactttgggaggcaaaggcgggcgaatcacgaggtgaggagatcgagaccatcctggctaacacagtgaaaccctgtctctactaaaaatacaaaaaaaaaaaaaagaaatacattgatctgtgtgatcgaatgtgaattaacaatgacgttgacttgatactacatttctgagtggttaccacattttattgattgtatgcttctcaccagactgcaacatcctggaggacagggagctaattcttaatcattttgtaaccatagctcctaatttggtggatacatagtaactatcaaataagtgaataataaatctatgggaagaagcagatggactccgtcttgaacccactcaatttttcccccatcaattacccctctctcgtttttcaatactgggtctcttgcagagttgcagtggcggccacctggtcagtgaaatcagcgaattgaaaaaccactgacttcattaacatgtctaaagaggcaggctgaaaaaactgaaaatctatcaggcatctcattccatagttccctgtttgacaagaagaccaaggtgtcttcaaagtctgccctaaggtccagatctcctacccacgtaggagacttctagtttcacaaatccccgatgtcggtttctctaaactattttattctttgaacatactctccagacaacatcgctatcctgaaaagcccttgctgcaattttgtttctctttcaaaacaatggctcgaaaatttccaaggaaatagcaagagggcgattcccttcttgaagtatttgagggagcagaagcttactgaagttcatgccttgggtcaccaaaggccaggggaggcagagcacggtgccagacttctccccatttttcgctgaactaagcaatcctttctcccctagaggtactgcagctgggagctttcagggcgtgtcttccccaccacccaacttctggaaccccagacttctcaattcctgtacccccaagaactgctcactttttgtacaaaaacctcaggcatagaggaaaggaatcttgcgcaaggtcgtttttcatttacaaaacaaaaaccccatgaaaaccaaaccggtacccacccattcgtcacttcattttgcagcatggacaacaataggggactacaactcccaaagaggactgcgctcgtccactggctcagaggccaatggacgcctggtacatgaccggcatcgactaatcagggccaggctcgatgaggctttgtctccctaccgcgcgcggggccgattctcccgcctcccagccccggcgcacgcgcgccccgcccagcctgctttccctccgcgccctcccctctcctttctccctctcagaaccttcctgccgtcgcgtttgcacctcgctgctccagcctctggggcgcattccaaccttccagcctgcgacctgcggagaaaaaaaattacttattttcttgccccatacataccttgaggcgagcaaaaaaattaaattttaaccatgagggaaatcgtgcacatccaggctggtcagtgtggcaaccagatcggtgccaaggtaagaattttacacctcttttatttctttttacaaggaaaaatccaggtaagttatgaaaaaatggttgtggggcatttgcacccgctatccttaatcaagatttgcccctctcaagtttgttacatttatatatataacaattgtagctagcatttgcctttggaaagctgggaatcatttttcttggcaggcacattttggagaaactagtaaaagggctcttcgggtttgggggcgggaagaccgaggacttataagatgttacttaaaagggcttctaacggtccgagaaccgggcagggagagagatgcggaaacggtcgcagacaaagcggggcgaggttttgcccatgtgcatcccgcccaacccccctgcggggtacttagggccaaaccggagcgggaaggggtgaggccatcgggcggctgcagagagctccagcgcaagggtggggggcgatgcgccagggtgggctgcgctgggcgctacctttcacaaaagaccagggaccccaacgcgcccgcgaccccagagggccggtcctgtatttgttcctgggtggaaggagaataagaacgggattaattttacttgctttcatggcccctaagagagacttttttagggcgtgaacagatatgtcgagaaaatgggggtgtgtggttttctttaatgagtccctcaggacttaatgggagagaaagaatcctttaaatcaaggggtagaaatgtagcgaaggaataaaaattccgaggccaagggggattttttttttttgcgcgcggttacagtgtagcgggggaggggcgggaggaagtgcggctgctacgttgtagcagaagggcggggccctgcggggcggggccggggcgccgtgggcgcgcggggacaatgcggcgttgcccgccggcaggggcgcgctaccttgggccccgcccctcgcgcgcggaatttttgtccctggccccgcccacgcgcgaagtcttttgtcggcggctcgacctgcgcgtgcgccgcagtcacgtggagggcggggggggtggtcgactgcggcggcagctctttcctcagacccccagccttttgtgcgccgcgcggtggggcggtgcccagcttgggggaaggagagcggcgcttatcgaagtgtggtcgacctccatccgcccaccgagcacttgggacccgctgcacatatccagagcagggaaagctgtggctttctcgggggagcgagtgtctaggggaagggtgtggcaggcccacgggatgccatgccctagaacaacggcctgagcgcttgtggaattaaaatgggagatgtggggccgaggtgggcgaattgggatccctccaggtcaggggttcgagaccatcctgggcaacaaagcgagaccctcccccatgccacgtttctacaaaaaataaaagtaaaaaattagctgggcgtggtggcgcgcgtctgtggtcccagctactcgagaggctgagatgggaggatcggttgagcctgggagttccacgctgtagtcatccgtgattgcaccactgcactgcaggctgggcaacaggaagaccctgtcttaaaaattagaagaagctgggcgcggtggctcacccttgtaatcccagcactttgggaggccaaggtgggcggatcacgaggtcaagagatctagaccatcctggccaacatggtgaaacccgtctctactaaaaatacaaaaagtagctgggcgtgttggtgcgcgcctatagtcccagctactccgggggctgaggcaggagaatcgcttgaacccgggaagcagaggttgcagtgagccgagatagcgccactgcactccagcctggtgacagagcgagactccgtctcaaaaaaaattaagaaaaagatgaaataaaatggtagttggggacatagttggctgggacttgacctgttgtggtctcgttgctccccctcggcagttctgggaggtgatcagtgatgaacatggcatcgaccccaccggcacctaccacggggacagcgacctgcagctggaccgcatctctgtgtactacaatgaagccacaggtaagggcaggagcccgggcagctcaggttcccttccctgtctcccacttatctgggatctctttccatttctgggcacgccttatcccctttgggtgaatctgtcattttgtccctttcgtgaaccaccgtcggggccaaagacgtctgctgccacctggtggcgggacctggaatgacaagtctctgatccctgctgtctcccatttccagtatatctataaaccttcccttctgccagatttcacagctcttaactttattctctgtaggtggcaaatatgttcctcgtgccatcctggtggatctagaacctgggaccatggactctgttcgctcaggtccttttggccagatctttagaccagacaactttgtatttggtgagttatacagatgatattagcagatgatataccatcgtgttcaacttatttgggtgcaaggacacagcaaaagttaggagatgattgttgtattggagtgctaatacagaaatgtgttctgaaatctaacggagggtagaggtagtgcctactattgctggtaaattatggggcagtagggggagaatatatcacagtgaaggagaaagaagatacatccgagggaattatttgaaaagttgaaagatggaaacatcatgtatcttccataccctgttaattgagcttttctcctgactgcattccaggtcagtctggggcaggtaacaactgggccaaaggccactacacagagggcgccgagctggttgattctgtcctggatgtggtacggaaggaggcagagagctgtgactgcctgcagggcttccagctgacccactcactgggcgggggcacaggctctggaatgggcactctccttatcagcaagatccgagaagaataccctgatcgcatcatgaataccttcagtgtggtgccttcacccaaagtgtctgacaccgtggtcgagccctacaatgccaccctctccgtccatcagttggtagagaatactgatgagacctattgcattgacaacgaggccctctatgatatctgcttccgcactctgaagctgaccacaccaacctacggggatctgaaccaccttgtctcagccaccatgagtggtgtcaccacctgcctccgtttccctggccagctcaatgctgacctccgcaagttggcagtcaacatggtccccttcccacgtctccatttctttatgcctggctttgcccctctcaccagccgtggaagccagcagtatcgagctctcacagtgccggaactcacccagcaggtcttcgatgccaagaacatgatggctgcctgtgacccccgccacggccgatacctcaccgtggctgctgtcttccgtggtcggatgtccatgaaggaggtcgatgagcagatgcttaacgtgcagaacaagaacagcagctactttgtggaatggatccccaacaatgtcaagacagccgtctgtgacatcccacctcgtggcctcaagatggcagtcaccttcattggcaatagcacagccatccaggagctcttcaagcgcatctcggagcagttcactgccatgttccgccggaaggccttcctccactggtacacaggcgagggcatggacgagatggagttcaccgaggctgagagcaacatgaacgacctcgtctctgagtatcagcagtaccaggatgccaccgcagaagaggaggaggatttcggtgaggaggccgaagaggaggcctaaggcagagcccccatcacctcaggcttctcagttcccttagccgtcttactcaactgcccctttcctctccctcagaatttgtgtttgctgcctctatcttgttttttgttttttcttctggggggggtctagaacagtgcctggcacatagtaggcgctcaataaatacttgtttgttgaatgtctcctctctctttccactctgggaaacctaggtttctgccattctgggtgaccctgtatttctttctggtgcccattccatttgtccagttaatacttcctcttaaaaatctccaagaagctgggtctccagatcccatttagaaccaaccaggtgctgaaaacacatgtagataatggccatcatcctaagcccaaagtagaaaatggtagaaggtagtgggtagaagtcactatataaggaaggggatgggattttccattctaaaagttttggagagggaaatccaggctattaaagtcactaaatttctaagtatgtccatttcccatctcagcttcaagggaggtgtcagcagtattatctccactttcaatctccctccaagctctactctggaggagtctgtcccactctgtcaagtggaatccttccctttccaactctacctccctcactcagctcctttcccctgatcagagaaagggatcaagggggttgggaggggggaaagagaccagccttggtccctaagcctccagaaacgtcttcttaatccccaccttttcttactcccaaaaaagaatgaacacccctgactctggagtggtgtatactgccacatcagtgtttgagtcagtccccagaggagaggggaaccctcctccatcttttttgcaacatctcatttcttccttttgctgttgcttcccccctcacacacttggttttgttctatcctacatttgagatttctattttatgttgaacttgctgctttttttcatattgaaaagatgacatcgccccaagagccaaaaataaatgggaattgaaaaaagctgcgagatgtgtgcttatttagggaaacacggctggctgatggaggcatggggcctgagttcagttgcactgctctccttaaattgacacttaatattgagtccctgtcctacggattcaaccaactggatattgggaaaagagttgtactggacatgtatagacttctcattattccctaaacaataatagtataaattatttacataatatttgcattagattaggtattacaagtaacgtagagatgatttgaagtacacaggttatatgcaagtactacattttatatgagggacttgggtgtctgccgatttggtatctcagggaggtactggtaaggacactgactgctttatagaccctcacatcattgtttctggtacccaaactgctctgagcaccagtcagtctttactgtagtctctgacagctcactacagccttgatgtcctgggctcaaacaatccatctcattctcccaagcagctgggactgtaggcataagccaggtgagccagtgcaccaggcccaccaatgagtcttaactggggaaggcataggcttagatgcaggatccagggatggaaaatggaagctgagaagaatgacaaatcacgtgtaactggtttccagaccagcatccacatcctctgggaacttgcagaaataaatgcaagtttttcatcccacccagatgtactgaaccataaatggttgaactggccttggccacccagcccaggattcctttgggttatgtgtacccatggccatttcctgtgatcctgtgggcttagtcaacctatgacaccaagataactagtgaagccctggtatggtggctcccacttgtaatcccagcactctggggggccgaggcaggaggatggcttgagcccaggagttccacaccagcctgggcagcagtgaaccatctaacaaaaaaaaaagctgggcatggtggtgcatgcctgtagtcccagctgctggggtagaggggggtggtggttgttgggggtaggggggtggggattggatgggaggattgcctgagcctgggaggtagaggctgcaatgagccctgaccctacccctgcaccccagcctgggtgacagagcaagaccttgtctttttttttcttttttcttgagatggagtcttgctatgttgcccaggttggagcacattggcgcgatcttggctcgctacaacctctgcctcccgggttcaaggaattctgcctcagcttcccaagtagctgggattacaggcacccaccatcacgccgggctaatttttgtattttagtagagatggggtttcaccacgttggccaggactggtctcaaactcctgacctcaagtgatccacccgtctcagcctcccaaaaagttctgggactacaagcatgagccaccgtgcccggcccaagcccaagaccttgtctttaaaaaaaaaaaaggataactaggcgggattgctaccttatggtcccattctaaaacaatctgtaccatctactacctcatacttttaagttcacaatgcaagtctcaaagctaccctgaaaacaataattccttttgccatgttttcaggaattctaggaactagtattattcccaacattccttctattttagcatgcttttctgactataatacactgttggggggaaaaattaactctaaaactcttgacagtatataagtaacttgcttttctcccattctagaaagcctattgtatgcaagaaagcctattgtatgcaagggaagaagctacattctagcattcattttctttctaatagagccaggatcttgctttgtcacccaggctggaatgcagtggtgtgatcatggctcactacagccttagactcctgagctcaagtgatcctcccaccttagcctcccaagtagctaggactataggcaagagtcaccatacctgagtctagcattcattttttttctctttttttttgaaacagtctcactctgtcacctaggctagagtgcagtggtgcgatcttggctcactgcaacctctgcttcccaggttcaagtaattctcctgcctcagcctcccaagtagctgggactactacttggcatgtttcaccctgcctggctaatttttgtatttttggtagagacaaggtttcgtcatgttggccaggctggtcttgaactcctgacctcagatgatctgcctgccttggcctcccaaagtgctgggattacaggcatgagccactgtgccgggccaagcattaatttccagttgcttctgttttattagtacttacttacagcaatttatttgggtagcaaagttgaaaacctccagcccatccctcagtcttggtcaggaaaatattctagacaacaggctcaaacagtctgatttaattaggaagttaaataagttgaggtggggtggagtgggatcatcagaaggctgacatgggaccgctggagttggcaatcatagcagtgtgaggttggcaaggggagcaacccccttcaagacaaggcacaaactatttggcaaggagagatgaggggtgggacctcactgtcaatggacatgctcagggaggccagtgggttacatgcaacaggaggatcattcaggcaacttcagctatgaggctgggcatctgtgagggctgaaggctcaggctgttctcaaaggcttgtgattcacctggcaaaaagacaacagtagatgacacttgggaacattcgggaggctgaggcccctactctcccgggccccagtttagacgaatgggctataggcagaacacacacggccagggttctttctggtgccctaccacctgtttccccaaacaaagacatcaggacccacatacaataaatcactgaagagaggagagggggcagagccttgtttgcacactctccttagctctgaatattctactgcaggcctccaggaggctccaaggaacccagcttgaaggtcattggtatgatccagtgcttttatttacatacgctttttttttttctttttttttttgagacggaatctcactctatcacccaggctagaatgcagtggtgcgatcttggcttactgcagcctccgcctcctgagttcaagtgattctcctgcctcagcctcccgagtagctgggattacaggtatgcgccaccatacccagctaatttttgtatttttggtagagatggggtatcaccatgttggccagggtgatctcaaacttctgacctcagctgatcgtccaccctggcctcccaaagttctgggattacaagtgtgagccacagcacccagcccgaatatgcatttctttctctttttttttttgagacagagtcttgctctgttgcctaggatggagtgcagtggtgctatctcggctcactgcaagctctgcctcccaggttcacaccattctcctgcctcagcctccccagcagctgggactacaggcacacaccgccacgcccggctgttttgtatttttagtagagacggggtttcactgtgttagccaggatggtctcaatctcctgacctcgtgatccgcccgcctcagcctcccaaagtgctgggattacaggcatgagctaccgcgcctggaatttttttttttttttgagatagagtcttattctgtcacccaggctggagtgcagtggtgtgatctcagctcactgcaaccttcggctcctgggttccagcaattctcctgcctcagcttcccgagtagctgagattacaggcatgcaccaccaagcctggctaatttttttttgtatttttagtaaagatggtgtttcaccatgttggccaggctggtctccaactcctaacctcaggtgatctgcctgcctcagcctcccaaagtgctgggattacaggcgtaagccactgcacctggccccatttctttaacatacacataatgcttactatataccaggcactattctaaacactgcaaatatttgctcgagcccctcaacaattcaacagggtagtttctaattattaacccaattttaagatgaggaaacaggtatagagaggttgattacttgtccaagattacagctagcaggcattgtagctaggattcgcaacaaaacagtggttccagagcctgtttgctgacttctaccatgatctacaggtgaattaactggggcgctgagaaaagcagtgatatgccctagaattaattaactgtcaataggctgcaactagttccctatactagtggggtgaccacaagcacaggttgcagagacagtcgacctggatttcactccagctgcactagcagaatgagtaggaacatgctggatgttgagtttctggactttgtaaaatcctatataccctaatggtagtttgatttaaaacaactcatttatgtagaagcttagcactgtgtctggcacacagaaagtgattaataaacatcaatgactcccaggcctggatgctggttaaatgctaggcatactgtgtcacacaacacaggaacctagcaattctcctcagctccaacctgagacctcacctgggagatgctcacgcctgtgagtctttccacactctctggcaggcgagttagaatgtccagtacttccccagtcactttggctgcccccatggtcccactgccgctggacaccagtgtgatcttattggctgaagtcaagggaccactgatctcctctgccacctggcaggagagagacacccactcagtgcccatgatctgaccacattcctcataaaacaacttactctgggttttaaggtcctcgttccactgatcatccttcctcactttggtcactaataattcccacccctaatttagagtccccctaggctgtttctccctaagcccctcactacaccccaccccttagtccctggttctatttcctcctttcttggtgcccacatgacctccagacctggggcagcttctctagcagcatgtccagctgagcagcctcttggtacagctggaaggcttctgccttcttggccatctgctcagcctcggctcgggctcgggcccctatggcaaaggcctcagcttccccacgcatctgagggttaaggatgcttgtgagattgacggaaatcattaagaacaagaaatccccgatcaagcagcaacccccaccctctccacaagccagcatggaactgcctcttaactcacccgcacagacgcggcttctgcctccgcctgcataattagttgggacctgtggacagaagggaagtggagggtggagcccagcagcccttactcccaggagaaaggcccagtgctgcagaggcagacgctcctgaaacctgaaatccataggagtccaggtggtgaaggcttcagcactccatcttggggtgcctaggtggcaagtgagctaggcagggtcagggaggggacatttacttctctgcctcggctaggcgctccagcttgtagcgctccgcttccgctggcttccgcacccgggcctccagctccttctcccgccgggcgatctcctgctcctgcactgccacctgctgggcccgctccaccacctgcacctgcacccgctgctcctcaatctgctgcttagtcttggccacctgggtaggagggtgaagtcaggttcacgctctgagtcagaggtgaagagcaagtgcccgggaaccagagctccagagtgggatataaaaataggagccggtggccgggcgcggtggctcacgcctgtaatcctagcgctttgggaggccaaggagggtggattgcctgagttcaggagctcgagaccagcctggccaacatggtgaaaccctgtctctactaaaatacaaaaaattagccaggtgtggtggcgaatgcctgtagtcccagccacccgggaggctgaggcaggagaattgcttgaacctgggaggcgaaggttgcagtgagctgggatcacgccactgcactccaccctgggcaacagagtaagactccatctccaaaaaaaaaaaaaaaaaaaaaggagcaggtgcatgaaggtgggttccctcctgtctgcttggccagtccagtggagtccagtgtttctctgatgagcccccgtttaatctatttttcccacgtgtgcccccttctagagtataaataccttgagggcactgagcacatgttggctttctgctatctccagtcttgctcaaatccccccactgttgctgcgataaccttagtgctagcctaggctactgcaatagctgacttattttttgtgggggtggggacaggtgatcttttttgtcttttgcacatggtgcagatttaacagaaaaaaaagtgaaccacgaggcttcttcctcattctccaaaccacctgggtccctttcccagagaaaccaccaagaccagcttcttgtgtatccttccagggatactctgaacatctacaagaatgtgtgtattcatagaattcctcttatttaggcagatttctttctttttttttgaggcagtttcgctctattgcccaggctggagtgcagtggcacgatcagctcagtgcaaccttcacctcccaggttcaagctaatctcttgcctcagcctctcaagtagctgggactacaggcatgtgctaccatgtctggctaatttttgtattttttttagtagagacggggtttcaccatgttggccaggctggtctcaaactcctgatctcaagtgatccatccgcctcagtttcccaaagtgctgggattacaggcatgagccatcgcacccagcctagatttcatcttcttattccttgcagtgtgagggaatcagaaggctcttatcaagatgctagtgaggagaggtgccaggcaaggaacacattttttttttctttttgagacatcatcttactctgtcacccaggttcaatggcgtaatcatggctcactgcagccttgacctgcctgggctcagatgatcctcccgcctccccctctagagtagctgggactacaggtgtgaaccagcacacccggctattttttgtactttttgtagagacagggttttctatgttgcccaggctgatctcaaactcctgggctcacgtgatccacctgcctcggcttcccaaagtgttggggttacaggcatgtgccatcacacccagccagaacacatgccttcgttgtcccattgctcaggctcagccatgcaccatcatcattgtaggtctcatcaatacatgtgatgcttcccctgcctcctaccttcccccgggcccatctgttcactccagagagaagcatagctctggagacggcactctgtactgtctttcaccctaaattttcaaacccgttccaaactggcctcgttgccctctacaccggtgtgcaggatcacctctctcctgtgtcccttaggcaaccatttgtctgtttctttttccttcctgtctatgcccaccttttggtgaaactcaacctccagaagcttcctcagaaagaatataaagacaatattttttctgaggtcttgctttctctgagatttttattctacctttttttgagatggaatttcgctcttggcacccaggctggagtgcagtgacgcagtcttggctcactgcaatctccatctcccaggttcaagcaattctcctgcctcagcctcccatgtatctgggattataggtgcctgccaccacgctcagctaatttttgtgtttttaatagagatggggttccaccacattggccaggctggtcttgaactccttatctcaggtgatccacctgcttcggcttcccaaagtgctgggattacaggcgttagccactgcacccggcctctacccttctattttaataccagttaggctgaaagcaggctgctatgttgggattaactttccatcagaattctgaaggcattcctccatggttttctagctttttaagaaatctgggcttgggccagtcatggtggctcatgcctgtcatcccagcactttgggaggctgaggtgggcagatcacctgaggtcaggagttcatgaccagcctggtcaacgtggtgaaaccccgtctctactaaaaatacaaaaattagccagcaatggtggcacatacctgtagtcccagctacttgggaagctgaggtaggagaatcgcttgaacccaggaggcagaggttgcagtagctgagatcacgccattgcactccagcctgggtgacaagagcaaaaatccatctcaaaaaaaaaaaaaaaaaaaagaaagctgggcttgatgcagtggctcatgcctataatcccagcactttgggaggctaaggtgggaggataacttgaacccaggagttcaagaccagcctgtgcaatatggcaagatctcacctctagaaaaaaatttaaaaattagctgggcgtggtggtgtgcccctgtggtcccaactactggggaggctgaggtgggagaatcacttgagcctgggaggttgaggttacagtgagccttgtttatgccactgtattggacaacagagcaagaccctgtctctgaaaaaaaaaaaaaaaaaaaaaaaaaaggaatctgaagtcattttgaagcctgcctctttgagatctctctctctctagaagctttcatattttttgtcctcagcattcttaagtttcacagtgttatgtttcaatgtatatatttttcattcattgcattgggcacttagtagaccatttcaatctaaaacctcatttttatataatttttctcagaatgtttctgctcccaataagtcatgccacatttgcatgtgcttgacttttttttttttttttggagatggagtctcgctctgtcacccaggctggagtgcagtggcatgatctcatctcactgcaacctctgcctcccaggttcaagtgattctcctgcctcagcctcccgagtagctgggactgcaggcgcgtaccaccacgcctggctaattttttgtatttttatagagttggggtttcaccgtgttagccaggatggtctcgatctcctgacctcgtgagccacccaccttggcctcccaaagtgctgggattacaggcatgagccaacacccctggccctgcttgactcttattagtccctttcccttacttccctgcttctttctgtggggttttatttttcccctttgtcagctcttgccaggttaccaagcataccctgtccctggctttcttggttgctcccaaatctgtgatggcttgctctgttgcccaggctggaatgaaatggcacgatctcagctcactgcaacctctgcctcccggattcaagtgattctcctgcctcagcctcctgagtagctgggattacagtcaccatttcagctaatttttgtgtttttagtagagacggggtttcaccatgttggccaggctggtttcaaactcctttgtcatctgctcagagggaagaaggtctcaacactgaaaggaagctctgagtatgtgggtgaggcttgctgactttgagcttcaccctacggtgatctggataggccatgtacggagaaacatctgattcaggattttaagttatttctttttggattggtcatgttccccagagcagtcttctgatctcttttttggaagatggaagttctgggagctgagtggggttgagggggttggggttggggttggctctcagtatttagcattcatgaaagttatagtcatttcatgcccctgttactggtaaactatctaggtcctcacctgtgctgggccagcccccatcacatcctctagtctactctcttcagataatagacttccaatggcaggtatggtaactcacacctgtaatcccagcacattgtgaggctgaggtggatggatcacttgaggctagcagttcgagaccagcctggccgacatggtgaaacccctctctactaaaaaaaaaaaaaaaaatacaaaaattacctgggcgtggtggtgggcacttgtaatcccagttgaggattacttgggagggtgaggcacgagaatcatttgaacccaggaggcagaggttgcagtgagccgagactgcgccactgcacctgcactccagcctggacaacagagtgagagaccctgtctcaaaaaaaacataaataaaatagataaataagataataaacctccagatgtctgttggagcagggcaggaaccattacccagaggcagtgaggggctctgagaaggtgcttttcacatgttcctcttatttaaccagtctaccacagctggagaagcactgggtgctgccagctcctgagcctcagatcatttcattgttttcccttttgcaggtttcaagctcagctgtgtcatacctgcttagtcaattactactgacttccagtttccaaaatgatgctctggtttccgttcctattttctccatcttttttttttttaaagcctagtcagctgggcatggtggctcacgcctgtaatcctagcattttgggaggctgaggcgggaaggatcctttgagcccaggagtttgagaccagcctgggcaacatggtgaaattccgtctctacaaaacatacaaaaattagccaggcgtggtggcatatgtttgtagaccaagctactcaggaagctgaggtgggagtattgcttgagcccaggcagttgaagctgtagtgagctgagattgtaccgctgcactctagcctgggggaccgagtaagacccggtctcaaagaggagaggagagaagaaagaagagaagagaaggaaagaaaggaagaaagaaagactaatcaagtgcaatagtgagaagtaggtaaagagtagaacaaggagttcaatctgtaactgactgaacaatcaattgagataactcactacctttggacaagcctctatctttaccttaaaaaaaatcattttagatcgcgccactgcactccagcctgggcgacagagcgagactccatctcaaaaaaaaaaaaaatcattttggctttagtgaggttttaggagagagtaaaattagctacatttgtttaatccatcatctctgaaaaagagcccaactcatcttttgcttttttttttgagacagagtctcactctgtcatccaggctggagtgcagtggcgcgatctcggctcactgcaagctccgcctcccgggtttatgccattcttctgcctcagcctcccgagtagctgggactacaggtgcctgccaccacgcccagctaattttttgtatttttagtagagacggggtttcaccatgttagccaggatggtctcgatctcctgacctcgtgatctgcccacctcggcctcccaaagtgttgggattacaggtgtgaaccaccgcacccggccttgcttcctctctttgcccgttctccacaaggcaaccagactgatccctatacaaatataaataagaccatggcacctttctgcttgaagttctccaatagctttccactgtgctttcagttctcttctgtgtctccatcgtgaccacacaaaccctttgtgatctggccctgcctgcctttcctcctcactcacagcacaccagcgcccccagatcagaaacctcctttctgactccacctcacagcctttgcacttactggtcccctgcctagccacaagccacgtatgactgactgactgactgactgtctgtcgtccgtccgtccgtccgtccgtccgcccgtccgtccgtccatccgtccatccgtccatccatccatccatatatctatcttagaaggagtctcgctctgtcgcccaggctggagtgcggtggcgcaatctcggctcactgtgccttctggattcaagcgattctcacgcctcagcctcccaagtagctggaactgcaggctcaaaccaccacacccggctaatattttttgtatttttggtagagacagggtttcactgttggccagactggtctcaaactcccggcctcaagtgatcttcctgtctcagcctctcaaagtgttgggattacaggcatgaaccaccgcgcccagccactttttaagtatgactacttaaaaagcacaggctagaatattcttggctcagaactgtacattgttccttcttatctccaagtctgatctcaaacaccacttcctcatagaaactttctctaccacccgctaacctaatatactaactcccctcccacagtttttcacatcaccctgtttatttccttcacagcacctaaacaagaattatagcctgggaaggtcatttacttgcttactagctgtttcctgtgtcataatgtaagctgcataagggcaggaatcttttctgcctcacctccatatttatagcctcacctccaaaatggtgtctagcacatagaaggcacttaacagatatttgttgaataaatccttctttcctgaacacctagcacactgcctggtgcataacgagaaactgataaaagttgaaaagagtccaaccagtccaatcccttaatctgcagacaagtaaggtcatgtttagaaggttaagaaccttatccatagcttcactgcaagctagcagtttccatcatggtaacccttttcaaactcaaactccaatgtgcatacaaatcacctaggaattcaccttgagattttgttaaaatgcaggttctgattcagctggtcagggccagggcctgcaattttgtatttctaacaagcttagcagtgatgctgcagctgctgctgggtagaacacagtttgagttgcaaagctgtatgccatgttcaacctgtcaagtcacccaggaatttaacataataacaaaagatgtttttaccttcattatgctttcagcctgtaccaactcttggcaaaaacaaaatgcataatattgctatcctttgggtaaaggtctcaaagtacagttgattttcattgttcttggtagttctgttctataaagtagccatgaatgctgaattagttaatacctaatttgttcctagaagaaatacaggctaggttcccgtgagcctctggtcaaaacattttcatcaactgatcaacatagagccttgctttatatgtgtttctgtttaaagacaccttatgtaaaatatattgttgattcattaacactgaactcacagctaacagcagtataacttatgcatgaacgaagcttacctaacacatgtatttctcccataaggcacatcatagcccgcttgcactaaaggacactagacagcactacagcactgatgcttgggggccattttaaagagtgaattcaccaataaaaagcacaaaaatgcaaaaaacacggcagtaaatatactgtgaaaataacacggcttacggtatgagagctgaaacaaggcagcagagcatctccttgatcaacctcacctgggtactgtgcgtgtctgcaaaagatcctgaaagtgctgcgactttattggtaaccttttgaggttaccaatacattttagtgaataggcaaattctcagatacgaataatgaagaatgaagatcaactatacttcctggcaatatcaagggctgcccatatctcactttgcaggattcaatgtccaagtccatgttttccttcttcatacccttttttaattaaccagggctgccgctagcccatagcatgcctctgtgcaaatcagaaattcctctgtgtagatgcagacccatgtcagaatgcactgcttgattagaggggcatgggccggatctgagctcggatccactttctcagtcagatgcctttgcacgggcacagcctgctccaaacatatgatcagccttattgatcatatcccttcttggccttctcttttttttttttctttttttgagatggagtctcactctgtcacccaggctggagtgcaatggcgtggtctcagctcactgcaacctctgtctcccgggttcaagcaattctccggcctcagcctcccaagtagctgggactacaggtgcgtgccaccatacctggctaatttttgtatttttagtagaaacagggtttcactatgttggccaggctagtctcgaactcttgaccttgtgatccacctgccttggcctaccaaagtgctgggattacaggcatgagccaccgcgcgtggccttttttttctcttttttggacaggatttcactgtcacccaggctggagtgcagtagtgtgatctcgactcactgcaacctgcgcatcctggctcaagcaatcctcctgcctcataccccaagtagctgtgactacaggcccgagctgccatgcctggctaatgtttgtatttttcgcatagacacggtttcaccatgttgcccaggctggccttgaactcctgaggtcaagcaatcagcccgccttggcctcccaaagtgctgggattacaggcatgagtcaccacacccggctggccttttctttaaagcttttcagctgtaacgtctgagtcttttaaatctctcctcatatgggggagttggtccagagatggagagccagaataagaccaaagttaaagtatgagaaatagtgtagtggtgtcctgagatggacagcctgagaggaatggggaaggggcagagagtggcctggcagtggctctgacctgaagctgataggccaggtcagcctgtgctcggcgggtgttgacctcgatgtcataggcggccttcttcagttcgtaatctctctgtgccttggccatctcgatctcactcaggtactgagcagacaccttttcctgcttggctttagcttcctgtccaagcagagatcaggtaggaaatgtcagggcagggggagaaaggccacggtgacagcctgcttcccaccaaggttctctttctgcctcatgtattttccctgctcacccagcacccctgcttcttctcagttgtgccacttctatcccctttcccactaagcaacccccatctctctcacccggatcccagcatctctcttggcctctgcttctccaatccgtgcatctttttggacttgagctgttcgagccttccccaaagagtgcaaatagtcctgtgggagagatgtagaaattagtcctttggagggcttaagagatgggagcaaggaagtggggaaggatcaattgcctagttttacctggtcatcgtgaatgtccttcagagtgtagctaaccacactgatgcccatgttgaccaggtctgaggaggccactttgaaaacctgttctgagaatttctgcctgtccttatagatctcctgtgataacaggatggtggggagaagggatgtaagttttttttttttttttttttttgctcactgcaacctctgcctcctgggttcaagtgattctcctgcctcagcctcccaagtagctgggattaccgacacccatcaccatacccagctaatttttgtatttgtagtagagaaggggtttcaccaggttggctaggctggtctcgaactcctgacctcaagtgatctgcccaccttggcatcccaaagtgctgggattacaggcatgaaccaccctgcccggccgggatgtatgctcttggatccactgtctctcacagactagtgtgggccttgggcccccctcattttgacatccttccagatggttccctgcccctaggccaacctccacagtcatgtgggccatgatggccctctggtggccctctaacgtctccagggcaatgtgggcaatctcagcctccgtcttccccaggaacatctgacaggcggccgccaacatctccttgttctgcccctggatttttacctgtagccagagtaggggtaggaaaggtgtggtgggggtctcatgaagtcagagaaaaagcagagagagaagggagagccctctaagaaatgcttcttccatttcagggaaagaaaggaggaggaggcaagtgccttggggtgcctggaaaagatgagactagcagaggaacttctctgcaggcaagggttgagaagactgtggccagaagatgtcttaatgtctgggagagagggtgatggggaagtggactgtggggaaaaggctctgaaagcttcacctgggcaatgccagtgactgagatggggaccccatggcgagtgtaaaccttttcactcttgacattgagggtcagtgtgttgagagagatcctaggggaaaaagaagggacagacagtaagaagaggaggaaaaagagaaaacggaggtcccccttccctggttcccttcttgcctacctctggatctgttggatgcagggcaggacaaagacacgccctccagccaccatgactggggggcttcggcagaaccctgcaaggtgtggggcagtgaggaacggtggcagagcttgaatgtggaagactgaggaactggcgggggtgaggggacagcaacccacaggagagaatctgggagctggaggggaagcagtctgggccttggaatggtgggaatcaaactgggcagttcgtggccatcaaggggcagaagtctggtgctgggaagttggtagggagagggagaaggggcagaggccagactcacaggggttctggggtcactggctgggaagggaacaacagtacttaccggagaccaccatggcctcatttgggccacaagtgaaaaacatggttcaggctggagctggaggagagggagggaaagcctttgcggatggggaaggcgcgctgtggcgtccacaggggcccatcctttccctttcccgtcaggccctcccagtctgcatccgccacggcccgtcccttctacacccatgggtccgctaaggcttttccctacaaaatccttaagatccccagctacctcttctccgcctgcgtatggtccctcccttcccctcgccgctccctttgataaaggtcccccgcgcccagaggcctgcagacctttcccctctctccctgcttctcggcagccccaggctccatctcccctcccccactcaccttccgggacgcgggcggcagcccggctggggtctcgggaagggcggggtcgcgcagggacctgggagccgggcaggggccgctcgcagaccagctttcctgggagctggccccgctcccgcgttccccaccctgccgcaccccgttgctgcggcagacgcgaccccgccccccgcaacggactaagcacccccacttcgccccgcctcggcccagtgcgctcggcccgcccctttcccggcaggccccgctagagtccgcagcccgcccgcccgctggctctcgggcccagccgggctgcctggttagcccggggagggccacatccctgccgccccagtcaccgcccttcttgagccgggaatcccgcccacgccgcgccacgctccgcccccgggtgagggacttgacctccgcctggcaccctggcgtaagggtgattgccacatctcggattcgccgcggggcaactacctgggaaaaccgcagactgggcaatgaaagactacatccggcaaccggatgctgggttctgtgactccaggaaaaggggctcctgggcccagggaggtgcgcgggctggggactcggccacggcgcctcccgccggtccttgccatctgaaggccgggaggagtggggagtcggcgcttgcaaagatacactcaagactgcagacagtaaatcaattttatttgtgttcacagaacatactaggcgatctcgacagtcgctccgtgacagcccaccaacccccaaccctctacctcgcagccaccctaaaggcgacttcaagaagatggaaggatctcacggatctcattcctaatggtccgccgaagtctcacacagtagacagacggagttgagatgctggaggatgcagtcacctcctaaacttacgacccaccaccagacttcatcccagccgggacgtcctcccccacccgagtcctccccatttcttctcctactttgccgcagttccaggtgtcctgcttccaccagtcccacaaagctcaataaataccaagagacctgcatttacagcagggggaacatctcacacccttgcataagttaaaataaatattacgtacacatctccatcacctaggaggacgtacataaatacatataaatattaattaggagcaataagaaataaattaacgacgctctccttcccaccgggcctagccccagctgggctgtgcctcggtctctatgcgcctcggtctctgtgcgcctcggtcccgcctcaagcaccgggtggcgtctccgctgtagtgttctgagttcaagttgcctcggaagtcccagttggggatacgctctcgcgcaccaggtacgcctggtgtttctttgtggtttttcggattctttttggggagtgcggggagtcacagttagaaggcggccgggtgttgctggaggaaagtgctgaggtccagagcgtagtccgagggctccgaagtcagattaaagggctcgaggacgggggacacaggggtgggcgccagggatgcggcgttaggggcgtcctctggaggcaggggcgccggcacaccctcttcagccatcaggatctggcagaagacgatggtgagcagcagaaagagaagccttttggctgggttcggttcctcgactggcagctggcgccggacctaaggggagacaaaacaggagacaggtcaggtcgaggcctctggagtcgggtcgttccccagtgactccagggcagcgcaccccgcgaatgcccacttcggcgatactcaccactcgagggtagagaaccctgcggctgcgctttcggtgcccgcgagaggcgctggggcgcccggcaggggccgctgcgggctccgggagagggtcgaaggtgaagatctcaggaccggagccccgccggggtcccgggatggtggagggggccggggtcggggcctgcaggatggtcatggtcgggtggcagctgcgagagtgacacatggtgagccgagcggagtgtaaggccaagtgagggtcggctgccggcagaggtaatttatgtgctcctgaaaattgggcgggtccttctaactcctcctcccgcagctggggagcggttggcagcagcgggctggaaattccgacgattaaacaaagggagtgggtggagacttgacatgcacaatcctaggcgcccaactgcacgttgtgagtgtgtgagtcgtgagtgggggtgggtgagatcccgggctgcaggcacatgtcgaggcatgtggcacctggagaggggctcactttagccacaggatccctcacaggcctttttttttttttttttttggagatggagcagtctcgttcggtcgccaggctggaatgcagaggcgcgatctcggctcactgcaacccctgactccctggttcaagcgattttcctgcctcagcttcctgagtagctgggaatacaggcacgcgccaccacgcccagctaatttttgtatttttagtagagacggggtttcaccctgttggccagggtggtctcgatttcctgacctcgtgatctgcctcgctccctccgtccttcttctagtagtctcaagttgctattgttgccatctttacgtccacgagttcccaatgtttggttcccacttataagtgagaatgtatggtatttggtttgcccgcctcggcctcccaaagtgctgggattacaggcgtgagccaccgtgccctgccaagagggctttttattggagatcaggccatcctgctgcaatactgacccagttatatgcacgcattcatgcacttgtaggtatccttagaatataaactccccaagaaggaaattgttacagaaatagtcaagattaagggagaaatgaacacactagcacacacagacacaaacctgcctgcctgagcacacatgaagacacacaccgcgtagccatacaaaagaacaaaattatgtgctttgcagcaacatggatgcggctggtggccattatcctaagcggattaactcaggaacagaaaaccaaataccacacattctcacttataagtgggaaccaaacattgggaactcatggacataaagatggcaacaatagcaacttgagaccagtagaagaaggacggagggagtaaggcaaaggttgaaacactaactattgggtactatgctcagtacctgggtgacaggatcattcataccccaaacctcagcatcatgcagtatacctaggtaacaaacctgcacatataccccagaatttaaaataaaagttggggagggagggaaggatagaaagattaaaaaagtaatacacaatggtggggcatggtggctcttgcctgtaatcctagcattttggggggctaaggtgggaggatcacttgagctcaggagcctgggcaacatagtgagaccttgtcactataaaataacaacaacaacaacaacaatacacaattaaatattattcagccataaaaagaatgcaatcctggaaaaaaaggaaaacataccacgtacacctaccaacacacatgtacacagtaaaggtgcaaagactgtatagggacagttcagcaaaactactctcttaggagcgtgcagaaatattcacataaaggctggtgcagagggccacaaatacaaaggcaataggttagcagccacccagatttgccccttgctgtaagtcaaacaaccaaatttatgggacaaacattctaaattgtgagacattatacaaatgttacagtaatggtaattactcaacttaaagcagattcacatttccataacttccttacagacagctgctcatggacacagaatttaactttttttttttgttttgagacaggatctggctttgtcgcccaggttgaagtgcagtggcatgatctcggctgactgcaacctctgcctcttggctcaagccatactcctacctcagcctcctgagtagctgggaccacaggtgagcaccaccatgcctggctaatatatatatatatatatatatatatatatatatatatatatatataaaattttttgtagagccagggttttgccatgttgcccaggctggtcttgaactcctgagctcaaccaatctgcctgcctcggcctcccaaagtgctggcagccaccgcgcagaatttaacatcttttgagcattcacctgtttcaggcgccctctgttgagggtactactgttgagagtcctgaggctagtttcagtataagtgctgtgccatgcagctgcctgaggaaagccagataaagctgatactccagccatgagggccttaccctccggcatgaggagggaaccatggccaggagagctctctatctgtctgtctctgttgctctctctctctctctttttttgttatattgagtttctgcctgaaggaaaggcaagctttcttgaagatcctaagaaaggccaggcacggtggttcacacctgtaatcccaacactttggcaggccgaggcgggtggatcatttgaggtcaggagttcgagaccagcctggtcaacatggtgaaaccctgtttctactaaaaatacaaaaattagccaagcatggtggcgcatgtctgtaatcccagctactcgggaggctgaggcaggagaatcgcttgaactcaggaggcagaggttgcagcaagctgagagcgtgccactgcactccagcctgggtgacagagtgagaccctgtctcaaaaaaacaagaacaaaacaaaaaacaaaaacaaaaacaaaaaaacctaagaaaactgaagactaagtgttaagggggggacccaaaagagctagtgttcacatctgtccaatcaatcaggggaggcttcatggaagagtggcactgaaggtgaccttgaacagtgggtgggatatgacaaattcagatgtggaggatgactgtaagaatggaattagcaaagaccttgagctggaaaagtacaggatgtgtttggggaatcacaagaaaaacaatctcagagtaagtttcctgtaacggagtagtgggaagtaataatggctggaaaggagtggaattgggcagagtggggagagcagagctgccaggtcaggagcctgggtttcactctagactgtagagcttgtgggttgctggatgagataaagggaggaaaattcaagcaggaaactgattgggatgaggagtgatgctctggacgggtagagactaaggcagtagacaggaggctattggaggggctcaggtagatgataacaagagcctgagaaggtggccctaagagacattcctagcataagataatcagaattgggcaatgagatggatatcattaggggaagggagcatgggagagggagagttgccgacagcaagaggatgaaaagatctgagatgactccagagatttgaaatacatctggctcagatctttctaccatcattttaagcctggtgcacaaagtgaatacatatatgatctcttccactggaggctgtgtcatacacatctttgtgtcctccagagaacccagcatggtaccttgtaggcagcagttgctcaataatcttgttaaatgccaggtgaaatgtacaactgtaagtgtgcatgtagtattcccaccttggctgggtcacaccaagcttctgagatgtggctacactcctccaaaccactcatacaaatgtacaacatctttagaaaagctgggacaattcttacacagacaccaaacaggaaacacttttctcccctcccacttaggaaacacttaaaaggatttttcaatcaagaacatgtaggaacacaaataagaggacaggccacaaccggctagaaatacactactgctctgtgtacaattcctgggcctacaagtcactttattttatactcactactcttatctaaatacacaagatcccttccacattacacacttcttcctggctggcataaaacacacctcctctgtaaacaaaggcgcattgctttcccacgcctgtcttcacacctgccatcattcttacatttacacccaagcacagggagcccaccacccccaacatccttattccaaggcaactcgcacgctacacaatgaccaacataaacccatgactacttacacatgtggacagaccctcacactcacataaacataaattgggagtagggggagatagtgatgatggaagaaaactagtgggtgggagagagagagaagcaccaaaggttaggaatgcattacttgtttatgatggaaaatttctctagggcattaggcagaggaggggaaatgaaggggatgccaggatcttgttttgccactacctcccacatctggaatctgggcctccagctgggtctagttatcctcgctgtcctcccggcacagagagacctttctttgtggcaagaccagaatgggacaaagagaagacctgagaacccggactgctcaccattcccaaccaatcccatccccattcctgctaccctcagagccctagggctctgctcctgctccttcctgccacacaggaagctagggaaatgttgggggtgaatcattaagccaataagggggtgggggagtgcaggctggggaatgagttaaggccagaaagtgccaggggctgagacgagcaactggactggctcccactgccctgatactggagaaacaggcccttagcctcctccatttccagctctcctcctcatttccttcccatcttcccccagatcaccatgttccttcatttccctcgtttgacctttgccttgatccatcaccactgctagcctccttctcagccccttgtttttcttcatgacacatatcacgttggggaatcattttatgtatttgctttttgctgttgtttgtcccgcctactggaatataatctccacgagtgtacagggccacatctgacctttttctcattagatctctgtagtatctccagtacttggctgtcacctagtaggaacttaataaatattcttaaatctgtctcctccgaggagctaaacctcatctgcagagaggtctgtttatctagccatgttcctttagaggcccccatgtttgctcttcaaagaggaggttgggggcactcaggtgtggctcaggtgatccgccgctgaatcaggaacaattgtgcagtgacgacagcgacagcaaagccctggcccgcgccctttacaatccctgacataggagtgagtcaggcctgctgcctcacctgggtactgctgcactgctgaccacaggcccagaacgggggacggcaagaatgggcactggcggaggcagaatgggcaggggaaagggaggcagagatttggaaatgggagcatctgagaaaggaaagcagggtgaagggactgcaccagggtcctgggggtagggaatgacaaagagaaagctttttagctgcacctggtattcagtagatcctcaataactacttggtgacttgagatgggtttgagatagaaaggaaacacggaatagcaaaaagaacatattgtaatctagtggtgttagacgaaattgggtttaagtgccagctctgctacttattaactaggcaatattgggccagttacttaatgttgctgaaaatctgtttcctcaattgataaatgggcaaattgacctctaggtaactgcaaaggttaagcatataaatttactccttctgggcacatagtaggtgcttcttgcatggagcaggggcattattataattatgagaagagggactgctttggaacagggatgggcagcagtgagccaacccaggagtagggaactggaatgagaaagtaacctctaactgctaacatcaccaggagatacaagttctttctctttttactctgccctccctccctctccatatcaggcaggttttgtggctctttattttccagagaagcaaagacttctgcattcctagttcctgttcaactaatgtgagtgattttatttttttatgtatgtatttatttattttttgagacaagatctcactctctcacccaggctggagtgcagtggcataaacatggctcactgcaacctcaacctcctgggctcaagtgatcctcccacctcagcctcttgagtagctgggactccaggaacgtgccaccatgcccagctaatttttatttattttggtagagacagggtcttgccatgttgcccaggcaggtctcaaaattctgggctcaagcgatcctcccgcctcaacctcccaaagtgttgggattacaggcgtgagcacaaagtctggcctttatttatttaaaaaatttagtttggctgggcgtggtggctcacgcccataatcccagcactttgggaggttgaggtgggtggatcacgaggtcaggagttcgagaccagcctggccaacatggcaaaaccccgtctctaccaaaaatacaaaaattagctgggcgtggtggcgtgtgcctgtaatcccagctactcgggaggctgaagcaggagaattgcctgaaccagggaggcagaggttgcagtgagctgagattgcaccactgcactccagcctgggcgacgagagtgaaactccgtcttaaaaaaaaagaaagtcttactctgtcgtccaggctggagtgcagtggcacaatctcggctcactgcaacctctgcctcccgggttcaggcgattctcctgcttcagcctcccgagtagcgcatgccaccatgcccggctaatttttgtatttttggtagagataaggtttcaccatgttggccaggctggtctggaaaactcctgacctcacgtgatccgccccctcggcctcccaaagtgctgggattacgggcgtgagcaccacacccagcaaaaaaaaaaatttgtttttactcaccactatactgacaaggaacaggtgattttaaacatcccctcccacctacattttagctggaacaattctccagaggcatgggggtagagtggggtggtgagttctaggcagcaagttaacaaatgacccctaaagatattcatctaggctctaggaggcccaaaatcaggccctggcagttcccctgacgcaaaaccatggcaagagttccgggagcaccaaggcaaggtcacaaaagtggcacgatgaccctaccctgggatgcagctcagcctgacccagcccaactcaacccagctaccctggaggctgctatgagctgagccgggagctgggaaagggcccagcattcctgtccttctgccaaagccggcttcttaggaccccagtgttgtggctcctcctttggtcttggtttctttcccaccagattataactccaccagagtaggactttatctatcttgtgtactgctctattttcagtgcctagaactgtgcctgtcaatcaatacaggctgctgaaaaggctagaaatacaggatcgttgatgtcattactgttacagtgctgttcccgtgggaagcagcctgcatctctctgtagacagctccaatgtcagccattggagaatttgatggagattgaagtcaaaacataatcataggggaaaaatgcacaacaaataaaatatttccccttttgtccagacttttcagacaccccgtatttactggatgagttgatctacaaagtgaaaggcataaattaaaggctctctaatgtttctcctcctctgaaaccccatgattcagcagcgtctcccatgtgtgctcaaaagttggacgtgcctccagcctaccctccaaagcagttgccataggctcttttcttccaaggttgggagggacagttcattccccaagaggcctctccaggggcggaggcgggtgctggggctggcctgtctgcagctccctggccctacccagtggggatcgcgtgtcagtactggggtttggtgggctgccaaggggtgagccctgaggcggttttctgggaaggatagatgccatgtgtgactcagaaccaagttagggaaaaaacaagctcactcaatctctagcaccctctgcctggcctggctttgcccatgagctcataaaagaggaagctgggccggccagacagtagctctgctttccctcatgttttctctccacgtctcacggattccctagagtgtctgggcctcaggccaccgtcatcctagctcctgggccctggctcttttatgacactttcccttcccagacacttggtcatttctttccccaggttgggaatcccacctaccatagaaggggaattgcacacaaggggaggttgcaaatctctgtgttccttggccctgctgaggcctccactgtcagccatgaccatttgggtttgtgcgtgtgactgctgtgtctctgacacagaccaagtggtgctgaccctgggagcctgaattaatagatttcttgagagctgagattctctggttcaggaaagaaaaagggggtaccaaatgactgggcagccgagccaccctcagggctgcaatattccagttgggaccaacttacctagtacttttggcattcagaacagttcactaccaaaaaggcacattttattttagtgaaaatgggacaatcatgggccataaagaaccttcctaactattgttcctccggttcacctcctataccccccagggctttcttgttcaaagacagacttgaccatgtccatgcctgcttcagtaagttcagtggctccaaactctctgagttcccaacccaaatccaggcaccttgcaggctttctctttcaacacccccattgcttcttgatgttgtgcatctctaattttgtcctttttctcacacatgccaaactcttacccattggaccctataaccgttctatttcttttcctttttcctccctattctcctgggaaaaaaccactcctgaacctgccatccagaattagttcatctacattgtatacaaatctctcaaagcatcacacacacgatattatagtcatttgtctatctttttgattgccaggagaggcacgtgccattgagatgcagccgtcttaatactggtaacctcttgacaaggcctaaaattattattaaattgtcaccattaaaaaaaaaatcagtggccaggcacggtgtctcattcctgtaatcccagcactttgggaggccgaggtgggcaaatcacctgaggtcaggagttcgagaccagcctggccaacatggtgaaaccccgtctctactaaaaatacaaaaattagcctggcgtggtggcaggcgcctgtaatcccagctacttggaaggctaaggcaggagaatcgcttgaacccgggaggcagaggttgcagtgagccgagatcacgctatcgcactccagcctgggggacaagagcaagacttctcaaaaaaaaaaaaaatcagtaagaaatgtataaaccagatattctcaacctatccctgtgggttgaactcatcctatctctgaccctgagcctttcacataaaatttggtagtatttggtgatactgcattttgttttaaaaagtcaggtagattgaagtataatttaaatacagtaaaattcatccttcttaggagtagtttttgatgagttttgataaatgcatatagtttgtgtaaaggcctccaccatgatgatatagagttttccatcacccccaaaagttccctgcatccctttgtagtcagtcctgtccccatcccctatagcaaccactgatcagacttctaaccttacagttttgcctgttctagaatgtcatatagatgaaactacaggctgggcaaggtggctcatgcctgtaatcccagcactttgggaggccgaggcgggaggatcatctgaggtcaggagttcaagaccagcctgaccaacatggtgaaaccccgtctctactaaaaattagccaggtgtggtggcgggtggctataatcccagctacttgggaggttgaggcaggagaatcacttgaccccaggaggcagaggttgcagtgagctgagatcacgccatttcacttcagcctgggcaacaagagcaaaactccgtctcaaaaaaaaaaagaaagaaagaaagaacgaaactacagtagacactcttttgtgtccagattcttttgctcagtataatatttttgtgattcatccatgtcatggcatgattcagtagttctttccttttgacttctgcatagcattccattgtataaatatatgacagttggcttattaattcaccattgatggacattgtggtttttttcttatttttggaaatgatgaataaagctactatgaacattcatagacaactcttttttaagacatgtattcttatttctcttgagcagatgtctaggagtagtataactaggtgcatgtttagcttagtaagaaatcgctgctgtgcccagtggctcacacctgtgatcccagcacttgcaccacgacgcccagctaatttttgtatttttagtagagacaggtttcaccatgttgatcaggctggtctcaaactcctgacctcaagtgatcagcccaccttggtctcccaaagtgctgggattacaggtgtgtgccaccatgcccagcctaaaggcagaaggatttcttgagcccaggagtttgagatcagcctgggcagcatggagagacctcgtctctacaaaattaaaaaattagccaggtgttgtggtgcgcgcctgtggtcccagctactctgggaggctcaggtcgaaggatcacttgaatccaggggtcgaggctgtggtaagtcacattcacaccactgcactccagcctgggagacagagcgagaccccattctaaaaaaagaaaaaataagggctgggctcggtggctcatgcctgtaatcccagcactttgggaagctgaggcgggcagttcatgaggtcagaagatcgagaccagcctggctaacatggtgaaaccccgtttctactaaaaattcaaaaattagctgagcgtggtggtgcgtgcctgtaatcccagctactcaggaggctgagccaggagaatcgcttgaaccagggagtcggagattgcacagtgagccaagattgcaccactgcactccagcctggcgagactccgtctcaaaaaaaaaaaaaagaaaaaaaagaatttgctatgctattttccaaagtggttcatactgacagaactgttttaaggaagctgcatcaaaatgttcctcttgtaaattcttgcttaaaatatgccaaaactaagtgttttttttgttatagaacaggttgccactcagattacctcaagggacagagatgggctggaatagagccacctcagtggccagtaacctgccccttgaagaaccagcatgtcttccagaagccacagtggcttccagtgcccagcggcagccccaggagcacaccctgcctccctgcccagactccttgtggctcagcatctctgtctgcagtgactggctctgcccaggtcttgtggggtagtgtgaagtgacactagcccacacacctgagcatgtatgatgcctcagaggcactgtgtgttttttttttgtttgtttgtttgtttgagatggagtcttgctctgtctgtagcccaggctggagtgcagtggcgcgatcttggctcactgcaagctccaactcccgggttcatgccattctctccctcagtctcccgagtagctgggactacaggcgctcaccaccactcctggctaatttttcgtatttttagtagagatggggtttccccgtgttagccaagatggtctcgatctcctgatctcgtgatctgcccacctcggcctcccaaagtgctaggattacaggcgtgagccaccacgcccggcataggcactgttttaagagctatactcaaatcaattcattaagccttcataaccccaactgttattttatctatacacccattttacagatgagaaaaatgaggttcaatgaggcaattcactttcttaaggttgtgtaaccaagaagtaatgggagttagatgtgaacctaggtctatttcattccaaagcctagtggcatacctatttgtcagagcatagatgctagagcccatctacctgggttcaactccatgtttgtttgtttgttttttgtttttgattttgagatggagtctcactatgttgcccaggctggagtgcaatggcatggtcttggctcactgcaacctttgcctcccaggttcaagcaattctcctgcctcagcctcctgattagctgggattacaggcatgtgccaccatacctggctaatttttgtttttttagtacagatggggtttcactatgttggccagactggtcttgaactcctgacctcgtgatctgcctgcctcggcctcccaaagtgctgggattacaggcatgagccaccatgcctggcttgtttgtttttagagtcaagatcttccactacagctcaggctgtagtgcagtggcgccatcatagctcactatagccccaaactcctgggctcaagcaatcctgccacttcagcttcctgagtttctaggactacaggcgtgtgccaccatgcccaactaattaaaaaaaatttttttttttttttggtagagatagggtctcactttgttgcccaggctggtctcaaactcttggcttcaaatgatcttcctgcctcagcctcccaaaatggtgggattacaggtatgaaacaccatgcctggacaactgtatgttttaattcacttaattttcatggtacacctctgagaggagggcatgacaacactcattatacaggtgcagtgacagcacagaactctgtgaagcaggggaatgacagagttgagtttggcatccaggaagtttgtctccagagacaaagctattgacctcaacaccttcctgcctctcaacaatcctcattattaatgttattattcaacccactgacctagctctttttgtctttggggttttacactgctctgatgttcatgtccttgcttatgtcttaaattgagactctgaatgggttgtgtacacactccccaggatacagtaacctttttgggtattctcacctctggctgcatcactggcctcttgccagcccttgagaactgcccctagctcaagcaaggatcctaatttagtagatgaggtcagggccggaagattatctgcagggtgacctatgcccaaggacttactcccaaatacttttctcaagagaaggtggtgtaaccagaagacactttaaggtcttgaggccatccccaaagatcatttgtttcctcaaacagattttgggctttttcaggtgagagactaatcactgaacccactgtcagtattcagcagtgtgcctgattgatatatactaggtactcaatggttttgactgaatgatgaataaataaatgaataaataaagaagcccagattctcttaatttaggtctatgctgtctaatacagtagcatgtggctatttattttattttattttttgagatggagtctcactctgtcgcccaggctggaatgtagtggcatgatcttggctcactgcaacctctgcctcccaggttcaagcagttctcctgcctcagcctcctaggttgctgggattacaggcttgtgccactatgcccagctaatttttgtatttttattatttatttatttatttattttgagtcaaagtctcactctgtcacccaggctggagtgtagtggcgtgatctcagctcactgcaggctctgcctcccgggttcacaccattctcctgcctcagcctcctgagtagctgggactacaggctcccgccaccacactcagctaattttttgtatttttagtagagacggggtttctccttgttagccaggatggtctcgatctcctgacctcgtgatccgcccgccttggcctcccaaagtgctgggattacaggcgtgagccaccgcgcccagcatttttgtatttttaatggagacggggtttcaccatgttggccgggctggtctcgaactcctgacatcaggtcatctgcccaccttggcctcccaaagtgctaggattacaggcgtgagccactgcgcccagctgcatgtggctatttgaatgtaaattctaatgagtcaaaatttaaaattcagtttctcagtttcattagccacatttcaagagcacgataatcccatgtggccagtgattaccatatttgaaaacacggaaatagaacatttccatcattacagaaagatttgttggacagcactaggctagatgacagatagggtgggggaagagaaaatgctgcattgggaaaatgcttggtataggctgatggctttaatctgcttttgacacttttaaaagagtcaagatcacttgtctctcattagattgtatcgcacactgcccattcagaggtccagaaaccacttcttcttcagaaatcttgtactgagaaatggaagcccatttctgatcacatacatgacccatgcttcttcagaaaggaaggcatgaagttgaagggggaactaagactgctgagttcttctgtcttcggccacaggaaactaactgattcatggcactttgtacccatgagctcatctagtcctcccagggcacaggaaagtggtgaaaataagtggccatggttcacagatttttcagctggtagaggctagttcctacacttaaaacatcagtagattgtcaaatgtgttccaactaagagcagtggaaggcagaaaggtgtataaaatatgggtcttaagaggtttataaccaagttaagggaaattaagagatcagcacataaatataagtatacaaaactgtaactgtatctgtagctatatgtgtgtgtgcatctatttattatctatctacctacttatctaataacataattaactaacatttatttgatatcttagagcttaacaagtacttttcctcatatgaagactcagcagatccccatgatgaatgtcaaacaaatggaatgttggtacagagagcaagcattctaggcattcgcagccgggtgagatcactgtggatggagtgatgggggaaagcttttgttgaggcagaaccagcaggaatgtggggtagtcacacaaacacagatacaattcctggtttccctactagacacttcccaggctctcaattgcttgtagtttttgtttgctttttttttttaagacatggtctcactctgtggcccaggctggagtgcagtgccatggtgtaatcatggctcggtgcagtggtactatcatggctcagtgcagtggtgcgatcatgtctcagtgcagtggtgcgattatggctcagtgcagtggtgcgatcatggctcagtgcagtggtgcgatcatggctcagtgcagtggtgcaattatgtctcagtgcagttgtgcgatcatgtttcagtgcagtggtgcgatcatggctcagtgcagtggtgtgatcatggctcagtgcagtggtgtgatcatggctcagtgtagtcgtgtgatcatggctcagtgcagtggtgcagtcatggctcagtgcagcctcaactgccagagctcaagcagttctccctcctcagcctcctgatttgttgggaccatgggtgtgtgccaccacatctggctaattttttgactatttgtagacacagggcctcgctatgttgttcaggccggtctcaaactcctgggctcaagtaatcctcctcggcttcccaaagtgctgggattacaggcgggagccactgcgctgggcccactgctagtagttcattttactttctaaaagataaaatgttgatgaagagttcttagtgatccatgttttctctccagtcctccaccaaaataacgcattttaaaaaaacaaactcccacatattttatagtgattctacaaatgtagaataatttggatactcttaatacaaaatggtttgagttacctttatttaataatcctgtgatgagcatacaatgacatacgtcaaataacttacaactcaggcttatataacatcggctctgccccaaattcctgccgtgtagaacacataaaaatccaaccctgcagtctgaccagtcttgcctaggttctccttacataatcataaccacttccctgccaggagcaattttaaaatgttcttctaaagccctgtgcacttcgccttggcttcctttaacttttcttttctctttttttttttgagagggagtttcgctcttgttgcccaggctggagtgcaatggcttgatttcggctcaccgcaacctccgcctcccaggttcaagcgattctcctgcctcagcctcccaagtagctgggattacagtgtgtgccaccatgcccggctaattctgtatttttattagagatggggtttctccatgttggttaggctggtcttgaactcccgacctcgggtgatccgcccaccttggcctcccaaagtgctgggattacaggtgtgagcaaccgcgcctggccggtttcctttaacttttctaaagagcttctacttttcttccttggcatttgaatttctttggcttcaagccacaaaaatgattgtccttaacttgaacagaatagatgagtcttgggaggatattgaatagctcacagaatcaaaggaaggccagagaatcaggctcaggagacaaagaaccagggtagctccagcggatgaggtagcaggaatcgacggtgttgtcctggctacctgctgaaatgagtaagtgacaaagggttttttccatcctttccattttgttcatcattcaaagccctagcagagagaatctgatcagcctagtctaggtaaaggctaggggaaaaagcacaccttaaccatagctcattaggaatgcacacaggtaattctccaaggaatccagtgactgttctcaggagaagagaatgcatgcaggatggtcaaacctcagaaaatatccaccacattcgcattttctcttacctccattttctactttttctaattatccacaacaggggtgactaacatatcttccaaggttgtgaaaaatatatagaaaaataaatctacctgtattggaatttttcccagaaaggattaatggttgggaaagtttggccctacttacccctcagtgttaaatataaggattaaagaaaatatatgcaaaatgcctattaccttacttggcatgtagcaaggttcattaaatgtcagtcccatttcaccccttcccattcacccactgttgtgctgaagccagctcacaccagttcatgagaagaatcattatagtttcaggaactttatgagccaactggcataacattggtagcttgaagttggcctttgtagagacagaaagatgtgattgctttctgcacccatcctgagtcatgaccaatactcccataacaaaagacaggcgaacaaaacaaaagcataacaaatttattttattttatgtatctatttttttgaaacggagtttcactcttgcccaggctgtagtgaagtggcatgatcatggctcaccatagccttaacctcctgggctcaagcaatcctcctgactcagcctacagagtagctggaactacaggtgcagaccaccacacacaggtaattttttgtagagatggggtttcaccatgttactcaggctggcctcgaactcctgggctcaaaccatctgcttgtctcatcttcccaaagtgctgggattacaggtgtgagcccctgtgcccgaccaacaaatttatttcatcaaagttttacatgacatgggagccttcagaaatgaagaccccagaaatgctcagagaaaacaatttttttgattagtttcgatgaagaatggacagccaaggctgggtgcagtggctcacacctgtaatcccagtactttgggaggctgaggtgggaggatcacatgaggccaggagtttgagaccagcctggccaatataatgaaaccccgtctgtactaaaaatacaaaaattagccgggcgtggtggtgtgtgcctgtaatcccagctactcaggaggctgaggcaggagaatcacttgaacctgggagacagaagttgcagtgagttgagatcgtgccactgcactccagcctaggccacagaatgaaactctgtctcagaaaaaaaaaaaaaaaagaacagacagtcatgtagaaatgtgactgaacacaggctgggcacggtggcttatgcctgtaatcctagcacttagggaggccaaggcgggcggatcacctgaggtcgggagttcaagaccagcctgaccaacatggagaaaccccatctctactaaaaatacaaaattagctgggcatggtggtgcgtgcctgtaatcccagctacttgggaggctgaggcaggagaatcgcttgaacccaggaggaggaggttgcagtgagccaagatagtgccattgcactccagcctgggcaacaagagcgaaactccatctcaaaaaaaaaaaaaagaaaagaaaagaaatgtgattgaacacaaagtgaatggtcgcatgggaataggctgagggagaaagccagcagagcctgtctgttgggattctgcttggtctctctgtgcagcattccttccttctggatataggcagggactctccaaaataagggttttatgacctactattagaaaaggtagctcagtttttttttttttttttaatgagctgtgcttatacagaaaggcaaaggaaggctagagtaatagttctaagttttatgattggctttgggggaaagacattctggtttctttgacctgccttggaggagagaggggagcaggagaaggtcagaggcagactttacttctcaggtccttcccatgttcttctcaacttgccaaaacaccaaactctggggtatcattttctgagccccaacaccttgatggaagtatttacaccacagaaatcggaaatgttgcaagtcagaactttcacctacccccagccctccactgcctctgagagttaaacatttacaggccactgccacatctgctcctttctttccttcacaagttgtgagaagaaccaagttagcattaggttgacctgtgagtgacaaaaaccgaatagaacaatggcttcctagatggaagtccatttctctctgacagaaacaaagtccagagccaggcaggcagctcggggctgggacagctccgccttgctgcctcactgtctttgatgcatggctctttgtgatttaggatgactgctcaggctccatgttcaggccaaggggaaagagaaggacaaagaaatacacaccccatcctagtaggtccacagacagaagtaacccgtaacatttctgctcatttcaaataggttggaaggaagtctctctgccacatctggctgccagggaggcttagagccctgttgcttcctgcaggcagccatgtgccctgctgggggctgagaaggggaggacaggggccggggggcagctgagaagccaggtgggattcgagaacatgtaggggagagggagaactggtgttggtgtgatgggaatgagcatagtttgtggaactctgggggagctgactggaatagaaaattaaaaatactgacaaatgaggttaaataaacaaggtggaagccagagctcagtgagggaccaggaaagcagacaaaagaatctttatctgctgccactagacaccggaggcactgaactttccagcaggggagctacatgatcagaggcatttcagaaatgttaatctcacacttaagtgctagacagattggaggcaggaggaaaaacaggaagcagcagggaggttggaaaggagaattatttcataagccaggtgtgaggtgattatcggggaacctgccccattagtcacgtaggttcttttctattttcctaagcatcggccagtttgagaaataaagggacagagtacaaaagagagaaattttaaagctgggcatccgggggagacatcacatgttggtaggttccgtgatgccccgcaagccgcaaaaccagcaagtttttattagggattttcaaaaggggagggagtgtgtgaataggtgtgggtcacagacatcaagtacttcacaaggtaatagaatatcgaaaggcaaatggaggcagggcgggatcacaggaccacaggaccggggcgagattaaaattgctaatgaagtttctggcacaattgtcattgataacattttatcaggagacagggttttgagagaaactggtctgaccaaaatttattaggcaggaatttcctcttcctaataagcctgggagcgctatgggacactggggtctatttcacccctacagcctcgaccatagaagatggccacgcccaggggggccagttcagagacccacccccaggcgtgtattctctttcccagggatgttccttgctgagaaaaagaattcagcaatatttctcccatttgcttttgaaagaagagaaatatggctctgttccgcccagctcaccggcggtcagagtttaaggttatctctcttgttccctaaacattgctgttatcctgctcttttttcaaggtgcccagatttcatattgttcaaacacatatgctctacaatttgtgcagttaatgcaattatcacagggtcctgaggcgacatacatcctccttggcttacgagatgacaggattaagagattaaagtaaagacagtcataggaaatcacaagggtattgactggggaagtgataagtgtccatgaaatcttcacaatttatgtttagagattgcagtaaagacaggcataagaaattataaaagtattaatttggggaactaataaatgtccatgaaatcttcacaatccacattcttctgccatggcttcagctggtccctccgtttggggtccctgacttcctgaacagtgattacatggggacaatgggaatgaggaggaagaatgagaggcatttgctagaaaatgtattcaaactgatggctggtctgaaagggagttgtaggctggggtgatgagagacaggtctcatagcaacagggtaaacaaagtaaacttggcttggttggtgttttatttattattattatttttttgagatggagttttgctcttgttgcccagactggagtgcaatggtgcaatctcagctcactgcaacctctgcctcccagattcaagtgattctcctgcctcagcctcccgagtagctggggtaacaggtatgtgccaccatggccagctaatttctttatttttactagagacggggtttcaccatgttggccaggctgatctccaactcctgacctcaagtgatccgcccaccttggcctcccaaagtgctggaattacaggcatgagccacggcacccggcctattattattattattttatttcgagacagggtcttcctctgtcactcaggctgaagtgcagtggtgcaatctcagctttctgcaacctctgcctcctgggctcaagcgatcgatcctcctgtctcagcctcccaagtagctgggactacaggcgcatgccacaaagctaggctaattttttttttgtatcttttgaagaggcaagattttgctgtgtccagcctgtctccaggctggtcttgaactcatgagctcaaagcaatctgcccaccttggcctcccaaagtgctgggattgcaggtgtgagccactgcactcggcagcaggtgttttagattgggctaccttgaagcagaacctggggtggggacttttgttcaagagatacactgcgggaggctctcaggagaaagactgaagaaaacaggatagggaagggaaaaaggctaagcaaggatgtgagcttcagcctgagctcatggggaagctcagggcagcaaattgcaccagtcaattgcacttggaggcatgggggctggcgttttgtagatctgctttaaggtcaggcagccactgggagtctgtccagagtgtgtgcaagggaggagggcttggctcctgtttggcccagggcaattctccagaaaaggggacaattgtgtgtggttatcagctgatattcccaaaagctggaaagtgagtggactcactggtgaaaaggacctgagcccaaacagtgtccatgatagtgaatccattttggttgtgttggatttgaggtggcaaagaaataaggaactggcatgtgactgcgggaaattggagctacaagacaggagttcaggtgaaaagataggactaggtatgtagctattggagtgggggacttcggcgcacagatgatagggttttttgtttgtttgtttgtgagggtttttttgtttgtttgtttgtttgtttgtttggagagagggtcttgctctgtaaccctggctggagtatagtggcatgatcatagctctctgcagccttgacctcccaggctcaagagatcgtctcacctcagcttcttgagtagctgatactacaggtgtatgtcaccactcccagccaattttttaaacatttttttagagactgggggtctcactgtgttgcccaggctggtctcaaattcctgggctcaaatgatcctgctgcctcagcctcccaaagttttgggattataggtgtgagccatggcgcaggcctagatgatagtttaaacaagagggaatttgtatatttgtcactttgggggttgctggtggcctttgaaggaagagtttcacagcaggacagagtacaaaaccatatggtgacgtgaggtctagtaatgctttccacagttaatgtccttccattctgactaactcttaacacctctagggtactttctccttcgacttatgtgctgctcattctggcttgtcctctgtgttctggttattttttgttgtccaacaaattgcctcaaaattttgtggcatgagacaaccctttattacgttcacggattctgtgggccaggaatttggacacaccgcagtggggatggcttgtctctgctccatgttatctggggctgcagctggaagactcgaaagctgggggactgaaatcgtctgcagacactttgcagtggatgctggcagttagctcagggacctcagggtttctacctgtggtctagttagagtttctcttgcatagtggctgggttgctgtgagggaaccaggcatgaactgctttttttttttttgaggcggagtttcactcttgttgcccaggctggagtgcagtggtgcagtcatggttcactgcagccttgactacccaggcttaagtgatcctcctgcctcagtctccctggtagctggggctactgccaacatgcctggctgatttttgtattattattatcattattttgtagagacagggtctcactatgttgcccaggctggtctccaactcctgggctcaagcaatctgtccatctcagcctcctaaagtattgggattacaggtgtgagccactgtgcccagctgcattctttttataacctcatctttttttgatctgcatcacctccctcctaccctattggtcagagtagtcacagccccgctcccattcaaagagagggaacatggcccctacctggagtgtcagtcatgggacaaggagagcaagtggaaaggggcacccaactttggaaaataccatcggccacactctatcggagcctccatttgctttttatgagtggccttcatttatttagctgtcattgggtcaacaataacagcaacttgaggaacctcttgagggcagggatcaggcctgttacgtttgtttactttatctttatatcctgagcattggcccaggaataagtatctgtggaaggacgggatccttctaagtctctcatctatttttcatacacggcatcatttaattctaaactagctgtcattaccatttcacaattgaagaaactgaggcttagaggcgcaaatggtctctctcagatgactcaggtcttctgggttgatgtggcttttattaagaacttgttgtctccaacagcaaatagcattcctaggggctggggctgtttcttcaaggcccctgcctctgcaccctggtagcagcacaggcctagctgtagggctgtggacagcgtgccctcggctgcttactgactggttggcatttgatacatatgatgatttaacatgaagatttagtgtgattttgcatctcttcatgggagcagggtcaggaccaggtcctgttgcggaattcagctttggggctgggtagaagactgggatgaagttgctcctcatctctgtgccctggctatgagcaggcagcacctgggtcaggagtgtgaggtgagtgggtgatgctaaggagggttcaggtggagcagtcagactgtgctgagtaactcccctggaggggaagggggacgtggtggaggcagttcctggaggcccagctcagagcggagaaaggagccaattaccacctcctcccaagtcacatcccagccctgggaatacttcacaggctccggggaaatcccggccaagtggcagagtgggtggtggggtgcttatcactcatgatcaggagtgggtgggggcggatcttagagcttgcatcaggcctcaattttccaactcctgcctgtgatccacccccgcgcccactgcacaccaccaaccaacctttgactttatctctttagttgatttctcagagattgcagatcaggaagggcctttggaaaccacagcttccacttccgctgtgggggcagaaagcacgggacaatctaaccctttcgtgcctggaaagtaacaaggaggactctgcccttaccaggttcccaaggtcctgtaccagccccacagggactgctgaggggagctttttctctctggttcctcatcctctcctctactcaggtgtaggctgtccctgcctagttggtctgacagtagctccctgcgacttctcatatcacctccgactccccagcctcacctccacgggccctgatgcactggcttcggctgtgtcttttgtgagtcatccttgctgctttgttccagccccactgatgggcctcctgccctcccccatgcaggacttagtcaccgctcgtgtcatcaatccctctggaatgcacccctcctccagacacccatgctccccacatcctttattattttgttaaaactagcaatgccccccccaacccccatgattaaaatagtacatgtttgttgtgggaaatctgtaatatgcaaaatatacacaaaagagaataaaaagcaccaataattccataacccaaattagctaacattacattccggtggatttccatctggcattctcctcgccagaactccgtccagcttcaggccttcatgtgtgcttattgcttcttttacctgcagtcatgctctctgtctctcccctccttcaatctgtgagcaaatctactcatccttattattttaagggtcattctttcagagaaaccttccctctacccccaagctagtctctttattacacactcacaatacccagtacttttccttgtagcactcaccacaactagaaataaatcatcatttttgtcctcttgtgtttaatgtctgcctagctacctgacgtaaggtctgtgactggttttcttgtttactctgatggccctagcacccatcacagtgccctgtactcagaaaacatacatcatacccagatgccttcccggaataaccatgtgcctgtcttcccagcacttacaataatcaatttaacaaatataattaatcaattactatgtgcctggcttggtttcaggtacaggataccaagcaaaatgacccagttcttaccctcgaggaggtctcagtcttttgagggagacagatcagtaatggaagctttctaatgtacagctaagtaaacggtgatcaatagtgttaggtaaagtgtggaggagaggtccgtgaacaatcctggggagatgacaccattgttttatcttgttaatgcatttacttcacagaatcacaggataatggaattggacggcaccatgagatcagcaggcccatctcttcctgtacagatgaggaaactaaagtggtgaagggtagtgaagccacttagccaaagccattgggtgacagatctgggaatagaacttggatctttagattcccagcccagggctctttccactgtacctgggggcctttggactccccctcccctctcctcttattctgttaatccccaagtcctttgattttccccatgaaggtctctccaatctctccacttttcctcatccccacatcaccaggctctaagcctccaacatcatctccagcctgagcacctaccctcacctcctacctcatctctctgcttctagtcttgccctgctcagatgccttctccactctgccgccaaaatgagcctcacagatgtacgcatgtctgtccctggcttagaactccagtggcttcccaccaggcttttagaaatatactcaaaattcttatatggtgtattagtcagctcaggctgccataacaaaatatcctagacggggtggcttaaacaacagaagtttatttctcacagttctggaagctgagaagtccaagaccaaagtgctggcaaggtcagctttattcagactttcagagtcctcttttctttctttcttttattttattttattttatttttttattttttttgagacagcatcctgctctgttgcccaggctggagtgcaatggcgtgatctcgggttcaagtgattctcctgcctcagcctcccgagtagctgtgactgcaggtgcccgccaccacacccagctaatttgatacttttaatagagacggggtttcaccatgttggccaggatggtctcgatctcttgaccttgtgatctgcctgcctcggcctcccaaagtgctgggattacaggcgtaagccaccacgcctggcctctttctttctctttttttttttttttttgagacagagagagtcttgctctgtcacccaggctagagtgcaatggcatgatctcggctcactgcaaactctgcctcccaggttcaagtgattctcctgtctcagcttcctgagtagctgggattacaggcgcccaccaccatgcctggctaatttttgatttttagtagagacggggtttcaccatgttggccaggctgttctcaaactcttgatctcaggtgatccaccctcctcagcctcccaaagtgctgggattacaggtgtgagccaccgcacctggcccagagtcctctttacttcgttgtaggtggccgccattttgctctgtactcacatggcctcttcgtgcatgtggggagagagagctctcttgtgcatcctgttccttttataagaacaccagtcccatcagattagggcctcacccttaggacctcatttaacctgaatcacctaaaaaccctatctccaaatatagtcgcattgagagttaggggttcaacatacgaatttggggggacacaattcattccatagtgtagggtccactgggccttttttggttgagcccaccttaccagcctcttctaaacccaactcacctctctgtctgtacgcttttatatcttggaatttttttggttcctccgacttgtctggatctcttgtagctcaggttccccctccccctgctctgatgtttttatattttcatcattttcaagtctcagtttgaacattagcttctaggagaggccttccctgatctgcatcctgtgttaggtcctctggctatacatgcctatggtaccctgaactccaccttgtgtaagagtcaccacctcagtcctgtgtgtttcatatctgtccttctgagctccacaaggcaggaagatctctgtctggttggttgcagtatccccagggctagcacagtgcctggtgcctactaagcagtcaagattaacttttactggtagatgctcaatacatttccattgacctgagctgtcctcagagagtatatgtattttgttgtctaatttgggttgaaatctctcagaagggtcctatctgttccttacttgaaatctcctatcccgtgcccatcctgggctccttcattcaggaaacattcccataaatgattattaactgatctccctacaactttcccaacatgtatcacatttgaaggaacaatcatatttaaaagaatatgttacatagcaggacagtttattatgaatgtcatgtaacaacaatctactgagaattaaaaagaaactaaagtgttcctctcctctcccacctctgggcaaccaggacttcatttctttgaaattgtggatttcctgacccctgaggtgtttggctttttgtgtatgttttagaaggaacagaaagaatcaggctgggtggggctgtaaaggaaacccaccctaagcaggcctcgttttggaagagctggaaagatacctgtggtgccagatggtatgagagtacagggtgtgagggcaggagcctacttcttggttgactcttagacttccatggactcatggaaaagagaaggggtgcaggctgggcacaatagctcatacctgtaatcccagcactctgggaggccgaggtgggcagatcacttgaggtcaggagtttgagactagcctagccaacatggtgaaaccccgtctctactaaaaatacaaaaattagctgggcgtggtggtgggtgcctgtaatctcagctactcgggaggctgaggcaagagaatcgcttgaacctgggaggcggaggttgcagtgagctgaagtcattccactgcactccagcctgggcaacaagagcaagactctgtctcaaaaaaaaaaaaaatcagaatggtggttagtttggagtgaggtgggcaggaaagagggtgctacatattgactgcaagggaaacaagggagactcctgggttgaagctatcttgtctagatggtggttaaatgggtaaatataaatgtaaaagctcatcggtttgtttcctgctgatagccaattagttaattaatttaatttaaaaaaactaattggggccaggtacaccggctcattcctgtaatcccagcactttaggagactgaggcaggaggattgcttgagcccagatgttcaagaccagtctgggcaacatggtgaaaccctgtctctgcaaaaaatacaaaaattatctgggcatagtggtgcacgcctgtaatcctagctgctcaggctgaggcagaaggatcacttgagcccaggaggttgaagctgcagtgaaccattatcatgccactactccagcctgggcaacacagtgaaaccttgcttaaaaaaagaaaagaaaaggaaaaggagaaaaacatcaaactgcatacatttttaaaatgaaaaaaggaaacaaattactgacacatgcaatgacttggatgaatctcaaaggcattacgctgagtgaaaaaagttctcaaaagttacagactgtatgattccatttatgtgacacttttgaaaagataaaacgatagcaacagagactagatcaaaatagcaaaatagcagggagtttgtcgggggcaggaaagaggatgggactacaaaggggtagcccgagggagtgttttaggcagtggagctattctgtttcagtggtggtgattacatgatcgattgtggtgattacatgaatctttacacatgtgaaactcataggactgtccactgaaaaaaatcaattttactttatgttaatttttaaaataaaattatttttaattaagaagagaccttctagcccctcaatagcgcagaggagttcctgaaaggaggcgctaaggaactggctaccctggaaaaggcataccaccttccccgccttgcctgtaccaggcctggggatcttcctgggccctctgtggttctcactctccttccttgtcctcctgctgggccagagtgacccacacatcccctcctttagcatctaagtctcggggtctaggaagccagtgtgctttgctcactcctacgtccccggtccctgagacacaggtacgaggtggttgctcattgacagagtgaaggaatgttctagcaccaggcctgatccgtcttggcacactccacaggcttttctatgtttagcctcctttccagctgcccagaggacacgccatagctgggagacatcactgtcgaggtgtgggtcacaagcttacccctcccatgaggcagggttaccagctttcctatcgtttgaagaatttagcaatctgagtttattattgctgtcattctaattttgaaatacatttttattatacaagaaaatctgttcaattaaaaaaaaaacagttaaaaaaaaagggagatccggtcccacttcccagactcataactgttactagatccttctctatctatctagaaacatttatgtgaaggtaggcatgtatgtccacatatatgcaacagatatgattgccccacagctcctgggctacaagtaatgtcttgtttctttgtggactcactcaaatagactctgggtccagccctgcccaccactgactggaactccagtgtcagacagttttcaggctccctccctcaggtcatacaagatgcccagactgatgcagtactgatgaaacggaagagtctgttcctctggccacatggtcagcacttgccagctgcttgcccaggtcagtggggaccattatgagtcaggctgctggtggggtgtggtggctcacgcctgtaatcccagcactttgggaggccaaggtgggtggatcacctgaggacaggaactcctgacctaagtgatctgctctccttggcctcccaaagtgttgagattacaggcgtgagcactgcgcctggcctattctgacttctgttaccataaattggttttgtctggaaggtttctaacaattgtggtgcaagttttataacccacctggttttgtcttgggaattagaagtctctcaatgttttggagagagattctgatgcccctcaccagaagtcatgctctggggccagtgagcaaagatgagcttcttatcctttttcttcctgggttccagcaagccaagcctcacagcagtgtccaaaaagttggtagaaaaggcctaatttttttttttttttttcaggcagagtctggctctgtcgcccaggctggagtgcagtggcgcgatctcggttcactgcaagctccgcctcccgtgttcccgccattctcctgcctcagcctccctagtagctgggactacaggcgtctgccaccgcgcccggctaattttttttgtattttttagtagagacggggtttcactgtgttagccaggatggtctcgatctcctgatctcgtgatcctcccgccttggcctcccaaagtgctgggattacaggcgtgagacaccgtgctcggcctttttttttttttttttttgagacagagtcttggtctgttgccgaggctggagtgcagtggcaccatctcagctcactgcaacctctgcctcctgggttcaagtgattctccggcctcagtctcccaagtagctgggattacaggcacacaccacctcgccagctaattttttgtagttttagtagagatagggtttagccatgttggccaggctggtctcgaactcctggcctcaagtgatccgcccacctcagcctcctaaagtgctggtattacaggcatgagccactgtgcctggccaggcctagcatcttaaaaacccagtggaggggaaggtcacagtcctaggaatcaaaaggcatgggttcacttcctctctctgatatttgctgcatgttcttgaacaaactatgtaaacttcttgagcctcagctatttcatcagtaaagtgggaacagtaacatccactgtgattatcagacctatttttaaatacttgaggccctctttccttcaaagggtgtaagaaaattgaactttgccactccatttaactcctacccactaatccaggcgtggctacgtgacttactgaggccaattaaaatggtgccttctaggtggaagttttaaaagctagtgtatgcttttccacatttttttttctccttcaactatagtaattggtgatattccacatagtggctgctctgtcaacctgggtcctggagttaggacaatgacagctcagagcagagcctcggccaacccaccatggatatgtggcaggagagtcaatgaagctttgctgcataaaagccattgagatttgggggttgtttgttactgaagcataacctagcctgcttggttgatataccacattacacatttattactaagattatgtgaagtaaaatgtttggaacttcttggtacataataaagctgattttcttcctttcagactctccttttttctttctaagagtcatgaacccagggatacttttttttttgagacagaatcttgctctgttacccaggctggcgtgcagtggcgtgatcatagctcactgcaggcttcccctcctgatcttaagtaatcctctcccacctcagccttccgagtagctgggattgcagacataccctgccatacccagctgatttttttattttttgcagagacagggtcccactatgttgcccaggctggtcttgaactactgggctcaagtgatccccctgccttggcctgccagagtgctggattacaggcatgagccaccgcacctggcccccaggaatgttcttaccagcttctaaccctggctaaagggcaatagaacagagagccactcaaccacaaaagaaaaaggaagaagaaaggatataaagcaacaaaggtacagaaatgtaatacagaggaaaggaaaagaaacaaagtgataaagaaggcgagacaaagtataaaaacagggaagaaagaggtacagagggccaggcagggtggctcacgcctataatcccagcaatttgggaggcccagtcagatggatcacctgaggtcaggagtgcaagaccagcctggccaacatgctgaaaccccgtctctactaaaaatacaaaaattagttggccttagtggtgcaggcctgtaatcccagctacttgggtggctgaggcatgaggatcgcttggaactgggaagcagaggttgcagtgaggtgagagtgcgccactgcactccagcctgggccacagagtgagattctgtctcaaaaaataaaaaataaataaataaataaaaataaaaaaaaacaaaacaaaacaaaacaaaaaaacaggtataagggatgtctgaggcatagacagaggtgattctcagaaaaacaaaagaaaacaaaaggaaaaaccactgaggcaaagggaaactgtatttcttggaattgttggccccaaccccaggcaaacaacattttcccttaagacaaatgaacaaacaaactttggcaaatagagcttctgggtgtgcatttatcagtctttccactcggtttactgggcgcctactctgtgcctgacattgtgcttgggctggctttacaggggcaaccaagacctagtgctggcctctgccttcaaggagcccctagactggtgtgaaacagacacaagaacagttgggattcaatctggcttgtgcaatgatggaagtgccaggaggaattaagggaagagaaggggaagcaggccctgcaaaggggctttctggaaaatttgagcctgagtgtcttgaaggataactaggagttagcaatggcaaggtttctgaggagaaagagggaccacgatgggcagaggggcaataggagccaggtagctgcaggtagtctggggttgctggacccttgatgagaggctgtgggcagcaggagatgaggctggagagggattcagggtcctatcacagagactcaaatgttaagatgttggtctttaagtggatgggctcggggatatttgggctgttatgtggggaagtgacatggtcagatttttagctaaattgctctgcctgccatgtggacagtgtgttggggcagcatttctttgcatgaggtctctggggattgggctgaatacccacccagcccagggcctgcaagtggacaggatggcctctggaagaatcatcctagccgctgcttcatcagtgtctcaggggagtgatggctatctgcggtggtggcgttggggtaaaagaatttaccagccgggcgtagtggctcacgcccataatcccagcactttgggaggccgaggcgggtggatcacctaaggtcaggagtttgagaccagcctggccaacatggtaaaactctgtctctactaaaaatacaaaagttagccgggcgcggtggtgggtgcttgtaatctaatctcagctactcgagaggctgaggcaggagaattgcttgaacctgggaggcggagcttgcagtgagccgagattgcgccacggcactccagcctgggtgacagagtgagactccatctcaaaaaaagaaaaaaaaaatttaccaaggcagttgtaggtagagaaaggcagatttattacagtaattaggaaaacgccagggttgcagggaggtaacttgcatttttttgtcagctgggatgtctggaaagttgaagtgtttgatggtaagcaggaagtttgtgagttctgctatctgagtaggagctggggcttgtaaagcagccaacagttgagcctgccttttggctccgtgtttgtttttttcttagtcttgtcctccttattttgttcttggttataaagactgaggaggctaatttggtaattttctgcataggggtcatgctgtgttatacaagaaaattagatgtttctttttgagagtttggcggtagaatttgtcacaattctttacagcctagaggcaagtttgcaggaacggacggggtttgctccatggtgggactggaaaacatgccgctctggggcaatgtcaatcagggacatgaactgcacttttctgcggggggcatctcactgagatgaacagagggttccacttacatccacagagggacttggatgcactttccaaagggggcatcccaccaattagaaaagacctcctggccgctcaggggcctcatgctggatggccagtccaggcactcacttatgctgggtgatcagcccaggcacgaggaaaaagaagggtaaaggaagatctctacctggtcttggcccaggaggtggggtgggtaagagaagactcaccgttctgaggctgtctgacatcacctgatttagcaaggcccaggacaggatggctggctgactccataggtgaatttagagtgagaaagagagcgtctgagttacctaaaacgtgtgtgagtttgccccgaacaagcttctgctgtcaattgtgtcacatatagggatgagggacttgcaattagagaagatgggcaacagcctttctcccttccaggcagggcagctagccctgttcactctgggccttcaggcaacactggagagtggccctggccagttacctttgattgccagagagatactagaagctggttgctgaaagactgaaaaaagaaaaaaagtcaggtcactcacccaaaccaggcaatgatgatcagatgcttccacatggacagacacctttcagtctcactggagtgtagctctggccagagacctgcaattgtctttgtgcttagatgctgtccttcgagggtcccgagttgggaaagggaaaggagagagagtccctgtatggagagggagagttccctgtatgggccaccaaaatgtttcaggggagcaacggctatctgggctggcggctcaggggtaagagaatttaccaagacagttgtaggtagagaaaggcaaatttattagagaaagtagaaaaacaggagagcaatgggcaggagagcaacgggcaggccagcagaagaggagctgactgcaaggaaacaaaggcttgttggggattttgtaggatggctcttaggctgtagagtgttatgtgcagtactgattatgccagggtagcagggaggtaacttgcatttttttttttttttttttgtcagccagggtgtttgataaattgaggtgtttgatggtaagcagaagtttttgagttatgtacattatctgagcaggagggccatatgtcttgggccatttgcctcatttctttgctttcccctggtcccaccagcctgatttgttttttaattattactcaacagtgagtgctgtcacatgctgggcattgtgctatgtgctctatgtggagtaactcacttactgtccccctatcccccaagaccatcctgtgacatgggcattcttttttttttgagatggagtcttgctctgtcaccaggctggagtgcagaggtgtgatcttggctcactgcaacctccgccttacgggttcaagcgattcttctgcctcagcctcctgagtagctgggactacaggtgcgtgccaccacgcccaattaatttttgtgtttttagtagagacgggttttcaccacgttggccaggatggtctcaatctcttgacctggtgatccacctacctcagcctcccaaagtcctgggattacaggcgtgagccaccacacccgaccagacatgggcattcttatcctcattttgactgagtaactgggcacagagaggctgttatgcatcccaattgcagagctaggcagcggcaagcccactttcacacagcgccagctgcctggctctgggatcagcctgtagtcactctccattctgcccctcaggatctgcttctcccaggaagcctctcacagaggcagaattttgcattggcatcctgcttcaagcttatgaaatcttctatacagatgacctcattccagccttgcaataatagcttctgtgaggtattattattcatagctttaaaaaagccagttgaaggaaatccagtgatttgtcaaaggtcagaagttaggtggccgctctcctgctcagacttacgttttctgacttggagtacagtgctccgctctcacgttatctgtcagctgacgctgcagccagcctcatactcaacacatcacatggttcgaaggctaggccactttccactactattgagctgcctcctctctatgaaaatgcttttctggattgagggagacagtcatagagaaatgtgttgttggcatcgatttcctatggttgggcaatggcttccgccatctggaccaggtgacgtcagctatctggatttctgccagcattccccggcccaggaaacagacttccggctgtctgggctctgagccatcttcggcctcctgggtgagtgggtcttgcaattcgcaaagtgaggaactgaaaagtcagctctcagggaagatttcactgtataaagtcaggtaaaaatggggaagaggcatactgggtcagagagacagggagcccttctatctgagtctggggcctttctcagatgagaggggaggatctagtgatcagacagggaaattgaagatctttgtgactaagactcaagtcaattgggggtagatgaggagtaaggtaagcaaagctaaagaaatctggggaaagatacacataaagatacaaacacagaaggtcaaatactggccaaggatagaatgttgatcccaaaactcatgcacttttctgtggacactgagacttgaacaaatcaataacttgagaatgtaagcagccctctgccatgttatactttgttgagttatataacagttgggggaaaacctaaacaatggtacatgtgttaaggtagacagttaaattgtccctccaccactccctgtctcattcccaaccctgctctccaggccaggctcataaaagttgttactcattttagccattccttcagccaatattcatcttattcattcttacaatcaccctgtgaggtaagagctatcattatgcctttattttgaaaattgtagtaaaatagacatagaatttagcattttaactgtttgtaaacatacagttcagtggcattaggtacatccacattattgtgcaaccatcaccatcagccacattcagaactttttcatcttcccccactgaaactccacccagcaaacaataccttcacattccccactttccttagccctggcaaccaccattctactttctgtagaatgtaaccactttagatgccttttattttattttttatttatttgtttttttgagacggagtctttctctgtcaccaagccagagtgctgtggcacgatcctggctcactgcaacctctgcctcctgggttctagtgattctcctgccccagcttcccgagtagctgggattacaggaacacgccaccacgcccagctaatttttgtatttttagtagagacggggtttcaccatgttggccaggatgtaggtgccttttataagtggaataataggctgggcgcgatggctcacacgtgtaatcccagcactttgggagaccaagtctgatggatcacttgaggtcaggagttcgagaccagcctgtccaacatggcaaaaccccatctctactaaaaatacaaaaattagctgggcatgctgccgtgtgcctgtaatcccagctacttgggagactgaggcacaagaattgcctgaacgcgggaggcagaggttgcagtgagctgagctcacgctactgcactccagcaagattctgtcttaaaaaaagtggaatcggccaggcatggtggctcacgagtgtaatcccagcactttgggaggccgaagtgggcggatcacctgaggtcaggaattcaagaccagcctggccaacattgcgaaaccccgtctctacttaaaatacaaaaattagctgggcgtggtggtgggcgcctgtaatcccagctacttgagaagctgaggcagaagaatcgcttgaacccaggaggcgagtttgtggtgagccgagatcgctccagcctgggtgacagagcaaaactctgtctaaaaaaaaaaaaaaaggtggaatcataaaatatttttcctcttgtgattggcttttttttttttttgagatggacttttgttcttgttgcccaggctggagtgcaatggcacaatcttggctcaccgcaacctttgcctcccaggttcaagctattctcctgcctcagcctcccgagtagctgggattataggcatgcaccaacacactgggctaattttttgtatttttggtagagacagggtttctccatgttggtcaggctggtctcaaactcctgacctcaggtgatccacccgcctcagcctcccaaagtgctaggattacaggcatgaggcaccacgcccgatcatgattggcttttatttcacttagcaggatgtcttcaaggtttatccacattgtagtgcatatcagaattttctttttaaaaaaatattccattatatgtatatatgtattatacaattttttttttttttttgggtggagacagagtctccttctgttgcccaggctggaatgcagtggtgcgatctcagcccactgcaacctcagtctccctggctcaagtcaacctctcaccaccttagtcccctgagtagctgggactacaggtatgcaccaccatgcctggctaatttttgtgtttttggtagagatgaggtctcatcaagttgcccaggctggtctcgaactcctaggttcaagcaatcctcccacctcagcctcccaaagtgcttggattacaggtgtgagctaccaggcctggccacattttgcttattcattcatctattgatggacacttggatggcttccaccttttggctattgtgaatgatgctgctgtgaatgtgggtatacaatttaataacatttatattgagatacaattcacatactatataattcaccttgtaagaggtggaggttgcagtgtggtgagccgagatcatgctcctgcactccagcctggggggtacaaagtgagacgccatctcaaaaaaaaaaaaaatccaccctttaaaaatgtacaatgaaatgtgttttttttttttttttttttgagacagagtctcactctattgcccaggttggagtgcagtggctcagtcttggctcactgctacctctgccgccctggttcaagcgacactcctgctcagaccagagtagctaggattataggctcctgccaccgtgcccggctaatttttgtatttttagtagagatggggtttcaccatcttggccaggctggtcttgaactcctgaccacgtgatccacccacctcggcctcccaaagtgctgggattacaggcgtgagccgccgcacccggcagaaatggtttttagtatattcacagagttgtgcaaccatcaccacaattttagaacattttcatcacactcaaagacgtcccatgctcattagcagtcatttccggttttacccccaatctctccccttcccagccttaagcaaccactaatctactttttgtctctatagatttgcctacactggacatttcatataaacaatcatacaatatgtggcattttatgtctggcttctttcacttagcatagtgttttcagtgttgtagcatgaatcagtactttctttttattgttgaatactatttcattgtatggatataccatattttatttatacattcatcagttgatggacatttatactgtttccaaattttagctattatgaataatgctagtgtgaacattcatgtataagattttgtgtggacatccattttctctttggtatacacttaggagtggaatttcgaggtcattaactttatgttccacttttgagaactgctttccaatgttgctgagccatttgacattctcaccagcagtgtatgaaggttccagtttctccagtctgtctttttgattctagccatcttagtgggtatgaagtggtatttcatggtggtttagatttgcattttcttggtggttaatgatgttgaatatctttttttttttttttttgagatggagtctcgctctgtcgcccaggctggaatgcagtggcacgatctcagctcactgcaacttctgcctcctgggttcaagcgattctcctgcctcagtttcctgagtagctgggactacaggtgtgcaccaccactcctggctatttttttatatttttactagagatagggtttcagcatgttggccaggctggtctcaaactcctgacctcaagtgatccgcccacctcggcctcccaaagtgctgagtcaccgcgcctggcctgaacgtcttctcatgtgcttattggtcatttgtatacctttggagaaatgtttattcagatcctttgcgtattttttaattgagttgtctttttattattgagttgtaagagtttgttataaattctaaatataagtctcttaactgatacataatttacaaatattttatcccattctatgggtcttttttacctgtttctttctttctttcttttctttttttttttttttttaatagcgacagggtctcgctttgttgcctaggctgatctcgaactcttgggctcaagcaatcctcctggcttggcctcccaaagtgcttgggctacaggcatgggccaccatgcccagcctattttcttaatgtcctttgaagcacaaaagttttaaattttgaagtccaatttatctatttttttttcctgcttgtgcactgtgtcatagctaagaaaccactgcctagtctgtggtcacaaagatttacatctgtcttttcttctaagaatttaatagttttatctcttccatgtaggtctttgatctattttgaataaatttttgtctatggtatgaggtaagggtccaacttcattcttttgcatgtgcatatccagtggtctcagcattagtatgccttgttacggaggaataaattttcagcttcgtaagaaaaggaccatgggcctggcaaggttgcttatgcctgtaatcccagcactttgggaggccaaggtgggagcatcacttgagccctggagttcgagaccagcctgggcattagagtgagaccccgtctctacttaaaaaagaaaaggaaagaaaagaaaaaggactgtgcccggttttgctcaccattatcttcccaggattctcttagccccatgcaagacacatgctacatgctcaataaatatagcctgagtgagtgaacatatgagtgactgagactcagtgtggttaaataacttgcataggtcagtcagttggaaggtggccagatatggctcaaacccagatcttctcatctaattcttttttttttttttgagatggagtcttgtcgtcaggctggagtgcagtggcatgatctcggctcactgcaacctccacctcccaggttgaagcgattctcctgcctcagcctcctgagtagctgggactacaggcgcgcaccaccacgcccagctaacttttgtgtttttagtagagacagggtttcaccatgttggccaggatggtctcgatatcttgacctcatgatccgcctgcctcggcctcccaaagcgttgggattacaggcatgagccactgcacctggccttctcatctaattctaattaagagtttttgtataatacttcaaagtttctgaaaatttcctgagttaccaaaagctctttgtcacaagaaaccatatttcttaggctgggggtggtgctcacgcctgtaatcctaacactttgggaggctgaggtgggtggaatacctgaggtcaggagttcgagaccagcctggccacatggtgaaaccctgtctctactaaaagtacaaaaattagccgggcgtggtggcaagcacctgtaatcccagctactggggaggctgaggcagggaatcgcttgaacccgggggcagaggttgcagtgagccgagatcatgccacttcactccagcctgggcaaaagagtgagactccgtctcaaaaaaataaaataaaataaaataaaataaaataaaaataaaaataaaaataaaaaataaaaagaaacggtatttctccaaagtttcatttgctgtctctgctgtatgatcccaatcatttcattgtttgtgagcagcaaaactcaaatctagggagcctcatgtcccttctgcttctgactcctccctcactcgagccacagagtcaaagattccacttccttctagggtagttttatagttggaaagttcttctaaatctcggaccacaacctcctgctgcaaaattgtgccataaatccccatgagtgttcagtgtaaccattgactataggacctggtttgatgtgggaggcatttggggcttgcggaaagctttatgtgctctgccccgtacaaagggcagccttggggcagccgatgcccttgctctggccctgacatgctgctccctttttgaagtgtggtttctgattctgggtgcagcttgccatatcagaggagaatgaagctaggtggcatgaaccccagaaaattttggtgaactcacctcttggaatgaggacaaaggagagtcttgaagcagaaaagagctgtgctccttgaaggggtccaaagttaaagctcacactggggtggattgggtagacttacctgtcccctctttgacagtgatgcatttgagcttctcctattgggtcctttggaaaagaattctttgaactactagaaaattaggacagggtgggggcaaaagaaaacgtatattgagagcttgctccatgtatttgttaggcatttaatctaggtatctaattttatcttcaaagtaatcctgtgggttggttttatcaatcctattttgcagagttggatgctgaaacttgcagtcacacaaggacttgaacctagagcttttctaaagcccgtactctttccagtaccctgagccaggggagccagcgggcagaaatgacgtgtgaggtaccctctctctcttcacttccatgtgatctgttactcattttgtcaagacatcctgggtcccaggtaagctccagtgattcccctgaaccagtggtgtgctggagccagctcagacctgctagtgagagtgttaaatattcaggaaatttgcaagctggttgttaaactgtcagtggttggaaattggtcatgggaggaagtatctacaccacggaataactacacacggataactgctacaaatcagggatccccatctcccccacaagctggtttgctaacacatcactgtctttcttttttttttttttttttttgagacagagtctcactctgtcgctcaggctggaatgctgtggcgtgatcttggctcagtgcagcctctgcctcccaggtttaagcaattctcctgcccaagtagctgggattacaggcacgtgccaccatgcctggcaattttcgtatttttagtagagacagggtttcgcaatgttggccaggctagtcttgaactcctggcctcaagtgatccaccagactcggcctcccaaagtgctgggattacaggtgtgagtcaccgcgcccggcccagagcactaaccttggggtccagagtgagagctgaagagaacagggcctgcccccagcagtcacagagtttcagctgcagactgagggaagaccgatagtatctatgggaaagtgtgtgcacaaaagagacagaaaagaggctggagaatattgattattcacacatgaacaaagtaagtaccaatgttattaatcccagggattttgctgggaggagttctggcttgttattagggtccttttctttcagatcaagaaaagggagatctaattcatgaagaaactagaaaagtgccctggattggtgggagtgtggtgggggtggtgctgcacaacacagaagaggggaactttgactttgagcctgaggtcttgggatgaaaagcagtttgtggaccggattcctgaccctggggttacagtaggaatccctttgcctgacaggtggtgaccttcctctggcaaggtccccagactcctaaggcagaagcaatcctcccatctcagtctgccaagtagctgggactacaggtgctcaccaacacacctggctaatttttgtgtttttttggtagagatggggttattccaggctgggatctgtgaagagcagaacaactctaagccccagggcaaaaatctgcagagctgagtctcatgccactttggggcactccatctgaggcctggaatcagaggccttccgcagcttgtgtagatgctgccaaaaggctgagctcggtggcccatgcctgtaatcccagcactgtgggaggctgaggcaggcagattacttgaacctaggagtttgagaccagcctgggccacatggtgtacccccatctctacaaaaaatataaaaattagccaggtgtgttggtgagcacctgtagtaccaactacttgggaggctgaggtgggaggattgccccaggggtttgaggctgcagtgagccatgatcatgccactgtactccagcttgggcaacagaatgagaccccatctcaaaaacaaccaaaaagatgctgcaaagaaacagcagcctcctgtaacaaaataagtggtacatcttttgtgatgggagcatctccctggggagcgaagctggacgttgcagccctaccctgtccccagaggtttttctgtccctttatgtctatgaacaagtacagctgaggccatcagcactgcacacacctggaacagtcttgttaaaacaggacctccctaaaggccaagagctaaggaaagagaaagtgaaggactgagcagcaggtaaccagaatcagagtcattgaaggcaactgcaggagttgccccttcctggctccctcccatggcaactccctgagtctgagtagagaaggttagagacgcatggaggttcccacccctcctgtgaaaggctcccttctgagttccaggtccctatctgatgacccacctcacctatgcctgcctaatacctgaatggccatctctttcagagaccactcttattcccaggtgtgtgacctcctcctacagactacagtgggaaagacaccatctccaggtaaccccaacacagtgaggggtggagcggggatgtggtcattcgttccaggtattgttgattctcttgaggttcaatccagggctagagattgtgattaaagagatacccagattgggtatgcgtgtaaagggcaagagctatgagaccaatgtgacatttaggattaattagtcccttccacagggcaggctgccactcactggtacagctcctgggctgagcctggcagagctcattagcaaggcagacactggaatgtgtgtgcaatggagggaggcttaaactcagaggctgctggttcctattaagcagagagaggttagaacttagtggcacagaaactgatatcagctaaatatgggttagtcaccaaccctgcaccatcttccctaacctttgagaaagtcttttcctactgcttgttcacatccattcattcaacaaacaattatgaattttctcttaggtgccaggtgctacacaagatactggctatagcagcgaacaggacagcccgtctcatcctcatggaggtcacaggacaatgagaagaaagacttttttatttttatttttttgagacggagttttgctcttgttgccgaggctggagtgcagtggtgtgatctcgactcactgcaacctccgcctcccaagttcaagcaattatcctgcctcaggcctcttgagtagctgggattacaggcacctgccaccactcctggctaattttttgtatttttagtagagacaggggtttcatcatgttggccaggctggtctcgaactcctgacctcaggtgatccacccacctcggcctcccaaagtgcagggattacaggcatgagccatcgaacccggcccaagaagaaagacattgaacaagtaattacagggtattgggtgttatgaaagaaaagcatggtactgtataatgaggtcatctaatttagtctggggtgacaaggaatgcctactaaagaaggtatcgtttaagacatacctggggaatagcggtagtgaaaatagaagctccagaaatgcagggaccatggctgacatgtttaccatgccagtgtctggcatggaagaggcccaattcctttggttgaaaggatgaagtaatctagctgaataaagggtgtgtgcgtgcacgcaggtgtgtttgtagttaaccttcctttagctcagcttaggaaacagcttttgtaaaactgcgtaactagtagtaggtgagagaggaatacgaatgatatacacaccattaaagacaacttactaacagcatgagtccgacatagattccttcctacttgggtttgaaccctgagcccaccacttactagctgtgagaaagtgaatgagttgcctccctttcctgtgcctctgtttcttgtaaattctatttccaagcatcatgaggataaaagacaatgtatatacgttgtttggcatattacagtcaatgcttggtaactactattgttattttttaaaaaattattattattattttttgagacggactctcgctctgtcgcccaggctggagtgcagtggcgctatcttggctcactgcaagctctgcctcttgggttcacaccattctcctgcctcggcctcctgagcagctgggactacaggcgcccgcaaccacgcccggctaattttttgtatttttagtagagacggggtttcactgtgttagccaggatggtctcgatctcctaacctcgtgatccgcctgcctcggcctcccaaagtgctgggattacaggcgcgagccaccgtgcccggccccactattgttatttatgtacaccaaatttatatccaaagggactttgatagttacaagaaaagacatataagtccagatatcattgaacaagagtaaaataataaatcaagtaggaatggaggggaggatatgcatgcagcactagataatatctatacagagagaggatgaggtcttggaagatgagtctgaagactttcctgttggagaggggctctatgctcggcatgctgactgcttttacaaccccacccccacatctcatcttaaccacaagacagtcttgttctggggagttcagagcctttattttttatttatttatttattttttgagatggagtctcactctgtcaccctggctgaagtgcaatggcatgatctcagctcactacaacctttgcctcccaggttcaagcgattctcctgcctcagcctcctgagtaactgggattacaggcacgtgccaccaagcccagctaatttttgtatttttagtagagatggggtttcaccatgttggccaggctggtctcgaactcctgacctcgtgagctgtccacctcggcctcccaaagtgctgggattacaggcgtgagccactgcgcccggccccagagtctttatttattatttagagagggtctcactctgtcacccaggctgtagtgtagtggtgcgatcttggctcactgcagccttaacctcccaggctcaagcaatcctctcacttcagcctcctgagtaattggggccacaggctcacaccaccatgcctggctaattttttaaaaaaatttttatagagacaaggtcttgccatgttgcccaggctggtcttgaactcttgggctcaagtgatcctcctgcctcagcctcccaaagtgctgggattacagacatcagccaccgtgcccagcccagaatctttcaacccccaaaatccattggtgtggggttagatgagggatcctaaaaggagagggaggctgctgtgcagtgatcccaccggcctgcttgcaggaaggagagccgaccctttcttgacctctaccaaagacactagagagctttgtaaatcttccaattagatgatacataaatacttccccaggtcttctaggcctgattcaataatatttacttcgagaggctgctgcttcctgtttgtattctcttaccacaagttatctgctgttcctactttcacttaagctttgtatcgtactctgtgagaaatgtttgagctggctggacacatttcctgaaatcatttctctagtcttttacgaaatgtctgcatttatgctggaatcatagagctgaactatcattgagataaaaattccagtctttaccccaatttacaattcctaaaaactgtcactttcttagatctcttcacattttcattacttctttttttttttgttttttgttttttgttttttgagactgagttttgctcttgttgcccaggctggagtgtaatggtgcgatctcggctcactgcaacctccgcctcccagattcaagtgattcttcctgcctcagtctcctgagtagctgggattacaggcgcccgccaccatgcccggctaatttttgtatttttagtagagacagggtttcaccatatttggcaggctggtctcaaactcctgaccttggcctcccaaagtactgggattacaggcgtaagccaccacacctggccagacattttcattgcttctattacctgtgtaagcaagtggctttattgggaggcgattttcacaaagaaacaaggttttttaaaaaaggtgtttcccgtaggtttctgcctgtgagaccacctgctgagaaatgcagagccgctttgggaagctgggtagtcagctctcatccatactcactcaaccatgcccagctgggcagtgccacttgtgtctgagcctcagcaaaactgcatgtccctaaatgtcaggggtcttcacagacaagtgaagcaaccagaaatactgaattttcagatggacatgtttatcgtactgaatctccatagccaggaggcacagacaactaataaagccctgtgccccattattgcttcattgattcactgaaataatgctgggtatgattgtggctacagagttaagccccattgttaattatatggtttggtgagggaaagagttttttttgtttttgttttggctagactaatgtaaacacagttcaaatgttgctccttcactggggacagaaaaatccatatgtggctcacgcctgtaatcctagcactttggaaggccaaggcaggcagattgcttgagtccaggagtttgagactggcctgggcaagatgacaaaaccctgtctctactaaaaataaaaaacaaaaaattaatttaatttaaaaaactgaggtgagaggatcacctgagcttggggatgtcaaggctgccatgagccatgtttgtgccactgcactccaccatggatgacagagtaagaccccatcttaaaaaaaaaatccacgtaatatagttcacatctttgcttcccatgtaaattcctcttttttgtgtgtcactatcagtatgtaattattgaaacttcaaggtatgactcttgttaggaaatgatagagaaaaaacaattgctctataatcaccccttacattgtgacttcttgcaaataaatacaccccactttcagcctcactcatttattataaaattgtaagaggtggaacaagcctttgtttagagatgtgattcatgtgttgcttgctggagtttctgaaaacaaacaaacaaacaaaaaaacccaagatagcagatggccagatgagccactgggaatggagcaatggctggtcatggcttctgtcaaacacaaagctctgactggagaagcttggaatcttctggatgtcttttgcaaagatgacaaattcttttagataggctgctgcttgaaggtaagatggaagaagctttgttcattgtattatggaggtctttgacccccacctcctcccaccccatgaactcagaccttccacattagacctgggctgtccctcagcatctttgctgcacattgcatgaaacttttcagttatttcatataacttccaggtgtttgaaatacgaaatgcgtaagagacatgttcctgagatgtcggagtgaggtttcctttgagagaaggaagtgagggttgttgcctacagattgttgagggtaataatgggatgaggcataaaaaggacctagcctagcagcaggcatgtagtaagagctcagtaagtattacatttgtttaattagtgtctgcctaccaggttcaacccttggcttcatatgtccagcaacacttcctaacttgcccattcttgcccttccttgggtcctgctgtttattctgttctctgaaataaggagttcctcccagtattgtagctgataaggttagagctcaaagcagttagggacctcaagaggtatcctagtctggttcctggtctagataaaatattatcccttattgcagaagtagcaactgaatctaggaaaggttgagtgatttgagagactatagtaggcataggtggggatattggctaattcttagttcttctgacttaggagcatctaggtcgtggacacagagtgtcccttttttcaaagtggagtcccacagtgcatcatttacagttattctagctgctggtggtatttggaggagtatcctaaacacttctctttccaaatcacaggcccagttgggatcaggaacatcaactcatatcacatgagcagaacttgttcatttggggacatccccaataatgccaaaatctatgctccagatgagtaagagtatgaattggaaccactttcagggaacctcttgtctgcacctcattctgtttttatttatttatttatttatttatttatttatttatttatttattatttttgagatagagtctcactctgttgcccaggctggagtgcaatggtgctatctcagctcactgcaacttctgccttcctggttctagtgattttcctgcctcagcctcccaagtagctgggactacaggcacgtgccaccacgcctggctagtttttgtatttttagtagagacggagttttaccatgttgaccaggctggtcttgaactcctgacctcaagtgatctacccaccttggcctcccaaagtgctgggattataggcgtgaaataccacgccccgcctgcacatcattctgggtggctgaatcctccactctcctggttctctcctctgtgctggtaggaggggaggctgggagagaatgggagaggtggtcatgatcagtaaagagacaattggagggagatggtccaaccctgtggttctggactctgaagtggtctttactgaaaacagcagattcctaggctcagaacagtggcaaaatagcttggaatttaggggtctctgatttttttcagattctcccaagctggagtgcagtggtgtgatctcagctcactgcaacctctgcctcccgggctcaagtgatcctcccacctcagcctcctgagtagctgggactacaggtgcatgccaccacacctagctaatttttgtagttttggtagagatcttcctgtcttgcccaagctggtcttgacctcctgggatcaagcaatctgcctgcctcagcctcccaaaatgctgggattgcaggtgtgagccaccgtaccctgcctcatatattttgtttcgtaataagtttactttaaatcaagatcgaaggccaggcacggtggctcacacctataatcccaaaagtgtgatttcagaatacaaaatttgggattataatttgtaatcccaaaagtgggatttgggcatgggccaccacacccggctgatttttttttttttttttttttttgatagagacaggttttataccacattgcccaggctggtttcgaactccttgattgaagcgatctacctgccttggtctgacaaagtgctgagattacagatgtgccttgcctgacctgattattgttttttatatctcctttaatgtacaggttagctctctcattttttccccctcttgaaataggtttgttggagaaaatggattttttttgtactgtacagctttccagtctgggttttgctgattctaccctggaggtgctatgtaagacactcctctgatcgctgacttcttgtgaattgctaatttcatctagaggtctgatcagattgaagttcagtgtttgtttttgcagggccccttctcagggaatgttgtgaacattcacccagaggtacatgctgtctgcttgtgtccgtctcttttggtgatgttctaagtcattcgtgatcatcgactaatccattatttcattaggagttgcaaaatagtaatattggaattctattatttctttcttcatttatgtatttattcttttttctcccccacacccactctcctgccctgctcgctcctttcttcagttattaggtagactgcttgtgtaagagaaattgcttcatcaaccatggggttcagttatggtttctataggaaaggcagaataaaggatttctctttattaccagttttcaagttgttgagttggttacgtagagtcctccacaagtgaccaattatttaagataccattatgaaatcatggattgaaacatatttgatgtacttcagttcactatagtccattatagtgattagtcttatgaatgctcaaattgtcccgtctttggcaagtgggagtcttttcacctctttctgacacagtccaaagagactttgatagctttttgagtttctgatttgaccagatatcgaagcacatcttgtacatttccgttcccagtctgagagccaagcatttctttaagaagatctgatttcagttgaagggaaatgatagactgccagagatgcttgttgctgctggattggttcttgtttctagggccttttagtgggaagaaaatataaacatattttaaaaataaactcattgtctgtttatactaatactttctttatttttttaaaattttttttaccagctctaggatcaaggaaaaagatactttccattcaaatagaggctctcagtgtttttatataacttcacatacttgcatctgtttttttctcccaaccaaatattctagtttccaaatccaccaacgtttgctttatccctcaatacttatacacagtcttaaaataacaacatcaatattatcgccattaatatgataatgcttttccatgaaagggccatacatgcaaagtggcccccaaaggtcaaaggagctgagaaaccaaagaacaaggtaggcaagtccagtttgttgctaaagcgtgtttcactggggaacttacagacggaagcctgctcttgggcagctgcaagacaggtggatctcacactgttatctcagacccaaggcttatttatataccatagggaaagagtatatgtgcttagtgcaagacaaaggcaactgtccagaacaggctagaatgctatgtgcgtcacagcctataatttgtgtgataacatcaaagttgatatattcttacactagggacagtaaataaagtaggaatcaggaggcgttcctgggactggggctaatcagatgacgacatggtggattagcatccaagatggggccacttttgtctccacaataaaactattctttcagttcctttttttttgtccttagggtatatctcactaggaatatacaatcaaattgcagtggtctaaagttgtttgagacagtttttctctctgtaattgtatcactaactcactgtgcggatagtcttttatttttgcttttgatttttagaaatttaaatatatacatgtatatattcttagatatagagtagcatccagatttccccacttctcttttttttaaatgaacattgggataaaattgacatacagtttgacctttctttacttaacaataggtgctgtcaatcagcccatggcagtatgtagagatatttattctttttttaatgctccatagtacttcatatttaatttagtcagtcccttgttgttagacatttgggttatttccagtatttatttatttatttatttttaaaatttgaaatagagatggagtttcaccatgttgctcaggctggccttgaactcctgggcttaagcaaacagcccgccttggcctctcaaaaagtgctaggattacagccaccatgctcggcctatttctagtcttttgttatgacaaacagagctgcaataaatagcctacacaaatactttttcatatttttgccagtgatgttttggaatagtttcctagaaactgtattgctggaaatgcatatgtaattttgctagatacagccagtcaaattcccttccatagagattgcctcattttgcattcctagtcacaatgtactagaatgcctatttccctatagctttgccaactacatgtattgacaaatttttggattttttgccgatctgataggtataatatgctaccttaggatagttgttttgtttcgtttgttttgttttttgtttttgtttttgttttgttttttgtttttttgcgattctcctgcctcagcctcctgagtagctgggactacaagtgagcgccaccatgcttgactaatttttgcatttttagtagagacggggtttcaccatattggccaggctggtcttgaactcccgacctcatgatccacctcccttggcctcccaaagtgctgggattacaggcatgagccaccatgcccagccaaaatttatcactctttctcttcaattgcagctgaagatttagccatagttatgcaagtcttttccactcccaagctgtagaagaatttatttccctttaatattgtgtggtttttgttttttaaagtctcatatggaatttatctttttgtatgtatgctatgataagtggaccaacttttatcttttttcatatagagtctcaaatttgatattactagctcctctctcccactccctcccttcagcttgatttttcctggacattttattattttcttggccaaagctggacatggatcaaaataaacgtctgttcaactccctgtgtttggttccattttgctgcctgtttttctttcctggattctttgtgatttcagcacagtgtttttccagccattcaaggagttatgacctttagggcttgaggaagagtgcattaaaggcctgtccagagaatgattcaagctggagtggatcctgtagacgtccaggagggcccagctctacttgggccagggggttggagagctgcttctcaggagcaggatagccactcacgcgtgtgaagcactcaggagcccagttttttgtgtttttgttttttccttgagacggagtcttactgtgtcgcctgggctggagtgcagtggtgtgatctcggctcactgcaacctctgtctcttgggttcaagtgattctcctgcctcagcctcctgagtagctgggattacaggcgcccgccaccacacccagctaatttttatttttagtagagacggggtttcaccatgttggccaggctggtctcgaactcttgacctcaggtgatctgtccagcagcctcccaacgtgttgggattacaggcgtgaaccacggcgcctgtcctggagcccagtttttgttgataacccatgtttcctgtttccacccctcccctgctcttgatttccattaggaatttctacctttctaactggaaaagactggggtcagggggtggagaagtgggcagaggaagggaggagtggaatacagaaattgaaacctgtcttactctgctcatgtaactcctagcgcagatccatatcattaatgccaactaccatttagtggttatttcctaccaccacgcatcagatactgcgctaagtactttatacagaataaatcatttcatcttgacctgttagttggctagggtggttacttccagaaggaaaaagaggcccagagataagttcacacaattggtaagtagtgggatttgggtctgtgtgacatcagattccaggctcaaaacgtctaagtttgtggcctccgcaaaaaaggctcataacagtctgtatttctgtttgcttttccatctaaagactaactttactccacttcactgcccagatctgctgagctcagatgtgagcagtgtgcttggctgtgactgcaggcatcatgctaggctgtagggacccgtggctggagaggggctccgtcttgccctccgtctgttctgttgccagcacagtgcttggcacacgtgggctctcatcacgtatctgttggataattagatgaaaaaggaggaggaagaggaacgtgtgctggagataaagcggcaggagtggaggaggcgcaggggaagagaacagatttgggaaaaaccagtgggacatgaggatgctgggcaggtgggtagaaggttgccatgtgttcagaagcacagaaaaagggtgacttccaggtcaaaagtgatttcaggatgggtgtgatggctcatgcctgtaatcccagcactttgggaagctgccggacggatcacctgaggccaggagttacagacttgcctggccaatatggtaaaaccctgtctctactgaaaatataaaaattagcaggtgtggtggcaggcacctgtaatcccagctactcgggagggctgaggcagaagaatcgcttgaacccagcaggtgaaggttgcagtgagccaagattgcgccactgcactccagcctaggcggcagagtaagactgtctcaaaaaaaaaaaaaaaaaaaaaaaaatatatatatatatatatatatatatatatatataaacacacacacacacatatatatacacacacatatatatacacatgtatacacacacatatatatatacacacacacatatataaagtgatttcagttttttcacaacttgatcactgagcaagtgacttagactgtggtcattttctgttaactcttatctgatccaactagaaagcaaagcaaaacaaaaacctgactgccttctacagacaagccaatgtgaaggtattcagctcacacaggttgcaaaagacagagaaacacccaagttacctcaggggatggacattccctaaggatacacaggtgagtaaggaaaataggaaatggcttctgtaggtctcaagaactagagcaccattcaggatgcgatggccacacacagtgtggcctggcagagaggaggaaactgctctccatcatcaagaatacagctctaggccgggtgtggttgctcacgcctgtaattccagtactttgggaggctgaggagggtggatcacctgaggtcaggagttcgggactagcctggtcaaaatggtgaaacctcgtctctactaaaaataaaaataaaaaattatccgggcgtagtggcgcatgcctatagacccagctactgaggaggctgaggcaggagaattgcttgaacccaggaggcggaggttgcagtgagctgaggttgtgccattgcacttcagcctgggtgacaagagcaaaactctgcctcaaaaataaagataaaaataaaagccgggccctgtggctaacacctgtaatcctagcactttgggaggccggggtggacagatcacgaggtcaagagatcgagactatcctggccaacatggtgaaaccctgtctctactaaaaatacaaaaattagctgggcatggcagcgcgtgcctgtagtcccagctactcaggaggctgatgcaggagaatcgcttgaacccgggaggcggaggttgcagtaagccgagatcatgccactgcactccagcctggcaacagagcaagactccatctcaaaacaaaataataataataataaattaaaaaagaaaatacagaaatttggctgggtgcagtggctcatgcctgtaatccctgcactttgggaggccaaggtgggcggatcacttgaggtcaggagttcgagaccagcctggtcaacatggtgaaatcctgtctgtattaaaaatataaaaaaaattagccaggcctggtggcaggtgcctgtaatcccagctactcaggaggctgaggcaggagaattgcttgaacctggaaggtggaggttgcagtgagctgagatcacgccactgcactccagcctgggcaacagagcaagattctatctcaaaataaataaataaataaataaataaaagaatacagctcttctagttcccagcccctctggggttcttgtgtgaaagaaaacattttaatgtgtcctttgattacatgaaattcaggcagagtctgatcaaagagatgccccattgctgagcacagtgaagagaaaggatgtcttccttgagcagagaggtggtgagaaatttccagaatagggcaccttgcatggagattattttaggaatgtcatctctggtatggaattctacttgtcccctgtagaattctgggctggcctacccatggttcaagcttccactgaagctgtgttgacccctagtccagtgtcagctggtaaaggaagggaagggctgaaggagctggacccccacagggaggtgttgaaagaaaggagaagcaagaggtgatattgaccagggaaatggcgccacttcctgagccagggccctggacttcctgtagttgtagaaaagtgcaggcctgagttatttaactatcaaagaaaaagtggtgctctgtgtgtgggaaaaacaacactcaatgtgctttttcctactctctcactcacaacaatcattaacacagaaggcttctgtgaccaaatgtgaggagttttgtctctacacatcaagcaagcaattaaatctgcagcagacaccagttgggtgtcttctaatccaattctgacactgtctacctagaggtagcatcagatcccacaggttgagggctcagtccccaagactgccccccgacccacattggtcacaggtttggccttgggaacttctgacccaccagcttcaagttgggattcccacaaccccctctttgggttcagttaaatgaacacttgcatttactggtttattacaaaggctagagatgaagagatgcacagggagaaggggcacagagcttccgagtcctccctgtgtgcaacaccttccaggaacctccatgtgttcagctctccagaagctctctgaaccccgtcctcttgggcatttatggagacttcactggacaggcatgactgaagcatggacaaccatgtcaaaatgtgattgaacaaaaaggatatgatctaatactaacagacagactggggaaacccagtgagtcctgtccagattcttcttggcctctctgtgcagcctttcttcctccaggatatggggcatcctttctgaaatgggagtcttatgacctatagtcagacaaggtaggtcaaagacagaaagatgggcaaagattcctgccttggagagataaaggagcagatgaaatgagggcaggagaaggtcagagagattccgtttattgagacctgcttctgaggcttaaagcacccaacattacaacaacagatggtaacaagggcaatgggaattataagccaggaaccatggactaaaacctatatataaattataatagcacagaatcccaaaggctggaaaacttgtgggcttccctttcaccatatagagccactgttctctccacagtgcctgcatattcctgtctctttctgttgaatgactttttttttgacacagtctcactctgttgcccaggctggagtgcagtggtgtgatcttggttcactgcaacctccacctcttgggttcaagagattctcctgcctcaacctcccaagtagctgggattataagctcctgccaccacgcccgtctaattttttgtatttttgtagagacagggtttcaccatgttggccagcctggttttgaactcctgacctcaagcgattcactcaccttggcctcccaaagtgttgggattacaggcgtgagccactgtgccgagcctgtagaatgactttaaatctccaccctctacctatagcagcccacttcctcctctctcttcaaatctcctttttctcactttcttctccatcttccttgcccttttagaagcagaaaagggcataccttttctgtgataccttttctctccatcatgaaagtctcggccacggtcctctaacaaaagacaggttaatgagagaaaaacatttattgaatccaagttttatgtgtcacggtggcctttagaatgaagacccacaggggccggatgtggcggctcatgcctgtaatcccagcagtttgggaggccgaggtgggcagatcacttgaggtcaggagttcaagaccagcctgtccaatatggtaagatcctgtctctactaaaaaaaaaaaaaatttagctgggtgtggtggcatgcacctgtagtcccagctactcatgaggctgaggcaggagaattgcttgaacacaggaggcagaggttgcagtgagctgagatcacactgccacactccagcctgggcgacagagcaagactccgtctcaaaaaaaaaaaaaaaaaaaaggaaaaagaaaagaattaagacccacagggaaaattctcattttttatgcttagagttgatgaagaatggatggtcatgtggaaacattatgggacagaaagggtatgatctcctggaggaatccagcaatgcctgtctgtccggattcttctcggcctctatgttgtagcatttctgccagccaggtatgggactggacccctctggaatgaggatcttattgtgtccagaaatggtgggttcttggtttcactgacttcaagaacgaagccacagaccctcgcggtgagtgttatagcccttaaggtggcgcttctggagtctgtcctttctgatgttcagatgtgttcggagtttcttccttctggtaggttcatggtcttgctggctcaggagtgaagctgcagatcttcgcagtaagtgttacaacttataaaagcagcatggacccaaaaaagtgaacagcagcaagacttattgcaaagagcaaaagaacaaaccttccacagtctggaaagggacccaagcgggttgccaatgctggttcgggcagcctgcttttattctcttatctggccccacccacatcctgctgattggtagagccgagtggcctgttttgtcagggtgctgattggtgcgtttacaatccttgcgctagatacaaaggttctccacgtccccatcagattagttagatacagagtttggacacacaggttctccaaggctccaccagagcaactagatacagagtgtggactggtgcactcacaagccttgagctaaacacagggtgctgattggtgtatttacaatccctgagctagacataaagactctccacatcctcaccagactcaggagcccagctggcttcacctagtggaccccacactggggctgcaggtggagctgcctgccagtcctgtgccgtgtgcttgcactcctcagcccttgggtggtcgatgggactgggcgtcgtggagcagggggtggtgctcgtcggggaggctcgggcggcacaggagccctttgagtgggtgggaggctcaggcatggcgggctgcaggtcccgagccctgccccgcgggaaggcagctaaggctcggtgagaaatcgagcgcaccgccggtgggctggcactgctgggcgacccagtacaccctctgcagccactggcccgggtgctaagtccctcattgcccggggccggcagggctggccggctgctctgagtgcggggccctccaagcccacgcccacccggaactcccgctggcgcccaagcgccgctcgcagccccggttcccgctcgcacctctccttccacacctccctgcaagctgagggagtgggctccagccttggccagcccagaaaggggttcccacagtgcagtggtgggctgaagggctcgtcaaatgccgccaaagtgggagcccaggtagaggaggtggcaagagcaagcgagggctctgaggactgccagcacgctgtcacctctcattatggcccaccattagacaagcgtaggtcagactatttatttatggtcatgtcttaggaagcagtagaagaaataattctagtttttatggctggctttggggaacaggggttctggtttctatgaccttagggaggactaattctggcttctgtggctcacttcaggagagaatgaggggcgagagacaggaggggcagaaggtcagagggatcttggtttcgaggctgcttctgagtcttcccaatgtcctttagttcaaagtattcagcatgccaaagtgccacactttggggtattgttttctgagccccagtgttttcttcctctcttcttcattctttctcaatctcttcttcttctttttttaattgagatggagtctcactctatcacccaggctggagtgcagtggcgtaatctccgctcactgcaacctccgccgccgtccgggttcaagtgattctcgtgcctcagcctcccaagtagctgggactacaggcacatgccaccatgcctggctttttttttctatttttagtagagatggggttttgccatgttggccaggctggtctcgaattcctgaccccaggtgatccgcctgccttggcctcacgcctgctgggattataggcgtgagccactgcatccggcccccaatctcttctcaatcgcattcatcaatatttttttttcttcttttttcatcccatcaccttgggtctctccttgtccgtctcccagtctttcttactgtcagctagccccttgcttttccccttcctttctttgcaacagcttcctatgtcatttgttcagcataatagaagtgcaaaccgatggcctactgcctgagtatctgctctgcagaaacatataatttgctaagagaacgtttatccaaaatattgtcttcaggaactgggagcagtggctcatgcgtgtaactccagcactttgggaggccgagttgggaggattgcttgagcccaggagtttgggaccagcctgggcaacacagtaggaccccgtctttataaaaaatacaaaaattagccaggcatgatgctacacacctgtagtctgtagtcagcttctggggaggctgagctgggaggactgcttgagcccaggaggtcaaggctgtagaaaactttgattgtgctactgcactccagcttgggtgacagagcaagaccctggctccaaaaaaaaagaagaaaaaaagtcttcaatctcaacaattaagaattggagatttcacataaaaatccagattttatcctgggcaacatgggcaacacagtgagaccctgtctttacaaaaaataataaaaatcagctgggtgtggtggttcacacctacaatttaatttgagaggctgaggagggaggattgtttcagcccaggagttccaggctgcagtgttttatgatagtgccattgcactccagactggggtgagacccggtctctaaacagaaatcccagttttacagcttaaaaaaaaatcaggctatctggcatcatgcgacctacaccgattgctagtaacagttgatggagctgggcggtggctgccccactctgttcaccagtgcccactccatgcctcctggcctccttaacactgagggaaagtgccaattggcatttattatttagcttgagtagttattttttcctctagcagacaaattttagtttctacctatatctttactgaaaaaagggaaaacagagaacaagagccaggtctttcttatcccaagcctgctacctcatttgcattttctgctttgcccctgcaggtggctgaattttcaaccttcgctatagacaaaggctcaggtctcccttcccaatttctcaccgtgcctcacttctcttttactctctccatatatcctcgtttctctttttgttcatataaggttaatatttaggccgggcacagtggctcacgcctgtaatcccagcactttgggaggccaaagcgggtggatcacttgaggtcaggagttcgagaccagcctggccaacatggtgaaacaccatctctactaaaaatacaaaaatattagccaggcatggtggtgcatgcctgtaatcctagctacttgggaggctgaggcagcagaatcacttgaacccgggagacaggagttgcagtgagccgagatggcatcactgcactccagcctgggtgacggagtgagactccatctcaaaaaaaaaaaaaagttaatatttaatgcattgatgtaaagctaacttcaggaccacttttgaaactttttttcagactgttttgaaatcttcaatcttcagaaaaagtctgtgaaaaatcattttattttcgcactagtgtgtgtgtttgtgtgtgtgtgcacgcacatagatgagagtagttactctgtgaaggatctgttacttatcttgctatttttcttgtttgactaacagcctatttatatggataagatctgagaatcggttactaggccgtatgaaagaggagtcttctttaggatcattatcagtacaggcctggcattcacctaaccagtaatagaaacctgaaaaacagtggcataaaaaattgagagtttaatttttctgcatttagaataaatctagaggtgagagcagggatcctaatagcatagcaatattggcaagaacctagtgtaattaaccatgttttctagtttctatattctgatacttccacatcgtggggtcttgctgaccctggagtgactgcctctcccaggttgagctaattcctagaagcaaagaactcgcctgtcatatgtagatcaaccaagctagaccccatcctcccaaccaccaccttcatcaggctctgccactcctagctgcaattcccctagtcagcccaggaccagtactagagagctagggacagcccctatgccccagaggctgctgaaattattcaaactagccgagcctgaacttgcttacctgcctgcacactcctgcctgtgaaaccacaataaaggctcttgcccacattttcctttcactcccactgcctcctgactgactcaggtgcttccccatggggcacccctgcacgccatgccatgcctcatgcatgtttctagggaactgtgagtaaatgtcttcctccatgaaagtgattcctgtgtctgcacgtcttgccacacctgattaaaacaaaccctggctacctttacaacccccaggtccatccagccttctgagccaccaccctgacttgatcgagcatcaggaatctcatttctgggcggggtgcagtggctcacgcctataatccctacactttgggaagccaaggctggcagatcacttgaggtcaggagtttgagactagcccggccaacatagtgaaatcctgtctctactaaaaaaaaaaaaagaaaaaaaaaatagctgggtgtagtggcatattcctgtaactccagctacttgggaggctgaggcacgaaaatcacttgaacctggaggtggaggctgcagtgagccgagaatgtgcccctgcactccagcctgggtgacagagtgagactctgtctcaaaacaaacaaacaaacaaacaaaaataaaaagaatctcatttctgggtggtgtggtggctcacacctataatcccagccccttgtgaggttaggataggaagatcacttgaggccaggagcttgagaccagcctggggaatgtagcaagactccgtctctacaaaaataaaaaataaaaaaaaaattagccagatgtagtggtatacacctgtagtcccagctactcaggaggctgtggcaggaggatcacttgagcccaggtgtttgaggttacagtgagctatgatcgcaccactgcactctagtgtgggcaacagaaggagatggagtgagagtgtccctaaagataataagaatctcatttcttaatttattttccttaacacttaccatattctgaaatactatatatttgtttgcttataatttgtttcctctcactagactgtaagctccttgaagccagagatttttatctgttttctttatggtaagttcctagaactgaaaacagggcctggcatgtatttactgaaaaagtgattaagtgctctccagttgatggctggagttcagaccatcatggttttgtttcaggctggaggaagtgggagagtaaaaggcaaagggggcccatgccagttgagtcagtcctagaaaagaacttttctgaaagtcccctttacatgacttaggctaacatctcattggccagccctatgccacaccaccactcctacctgcatggcagtttgaggcaaaaaaaaatttaaagcatagaactttgctaaacaaaataaaattggggttctgctagaagaaggaagggacaatgaacactgggtctctgcaagggggctgttggctgcactccaaatgcccgcagcattatacacgaatcatacatggagctctttttttttttttttttgaggtggagtcttactctgttgcccaagttggagtacagtggtgtgatctcggctcactgcaagctccacctcctggattcacaccattctcctgcctcagcctcccgagtagctgggactacaggcgcccaccacccccggctaatttttgtatttttagtagagacggggtttcaccatgttagctaggatggtctcgatctcatgaccttgtgatccgcccgcctcggcctcccaaagtgctgggaccgcaggcgtgagccaccgcgcccagccctacatggagctctttaccctggcctgtgctttcctctctatttacttttttttttttttctttcctgagagggagtcttgctctgtcgcccaggctggagtgcagtggtgtgatcttggctcactgcaacccctgtctcctgggttcaagcgattctcctgcctcagcctcccatgtagctgggattgcaggtgcctgccaccacacccagctaatttttgtatttttagtagagaacagggtttcatcatgttggccaggctggtctcaaactctctacctcaagtgatctgctcgtcttggcctcccaaagtgctagaattacaggcgtgaagccaccacgcccggtttcctctctatttactcttgtgagtaacatcagcttctttgaacttcaccaaacttaattccttaattccatactaactgtttatttgttgagtttccaagatgcaattgcatataattccaggaactgtgagtagtaagaacccccttatcagctgtcctatttttagatatcatgattcctactgaaacattcagtggcttaagctctgcccagcatgttcttgaccctgtgtgcctgtggggtgtgtgtgtgtggtgtgtgtgtgtgtatgtgcacacagtcatgtgcactctcacatcacataaggggaagataaagggagactctccgtggctcttcctccttttttccaaggctgatgttggccctttctgaaaatgctttaatgtgtagaaagcagcccacagataggcactccctgtgataaagcagtcacagccaaagcagggtccctcccacctcagcctcctaagtagctgagactacaggtgtaccaccacgcttaggtaagtttaaaaaaaaaagttttgtagagatgggggtcttactatgttgcccaggccgatctcaaactcctggcctcaagtgatcctcccaccttggcctctcaaagtgctgggattacagatacgagccaccacacctagctgagaatttctttatggccatcttctggacaaaaagtcaaggagagtttagagtaataattccagtttttatggcttttgcttcggggaaaaagggttctagtttctaggacctaccgtggggaagaggattctggtttctatgactcacttcaggggagaacgagggacaagagagacaggagggcaggagcaggtcagagggaccttggatctgaggctgcttctgaggccttccaatgtcctttagttaagtactcatcgccatactttggggtattgtgttctgaaccccaacagaaacaactcactctctcggcatcagccttgtgcctatacccacaggagcaggagcacaagccattgcaggtgcgggctcctcagatggagcaactccaatgtcacctgctcctcacctgtacccagtggacttttttggcagcctcccccatcttctcgtgtggctccatatctttatatcttctgtggcagacgtagcctgctgcctccccaaactctatcgtcctcttctccttcaaccatggaaacttgattttgtctgtggcatccatgtgcctctttgaaacactcacctcctcagactgccttgaatccaggggtggccacatgactgggtaatgagtcaccggtagaagtcggcttgatggggcttttagggaaacaacggctttcctgtttttgtttttcttcttcttctttttaaattttctcctgctacccctccccttgtttgtttttaagatggatttgttcggaacacatcttttgctctttccttctcctttctgcctggaatgtaaatgtgatgtctgaaggcagagcaaccatcttgcacatgtgacatagaaaggtagatgtgaagacatctagcaggagattgcatctctggtgattggagcagctgtatcagctctggactgcctgctcaagtcttcttcataactgggaaaaataaacacctatgaagttaggccattgtattgagtttttgttactcaagaaccaaacacaatatttattgagatggcatttcactcttattgcccaggcttgtgtgtggtggcctgacctcagctcactacaacctctaccccccatccagccctgctccaggttcaagcgattctcctgcctcagcctcctgagtagctgagattacaggcgcccaccacgtctggctaatttttttgtatttttagtggagacggggtttcacaatgttggctaggctggtcttgaactcctgacctcaggtgatccaccctcctcagcctctcaaagtgctggaattacaaaggtgagccacggcacccggcctttttttttttttgagacagtctcgctctgttgccaggctgggatgcagtgtggtgtgatcttagcttgtgtccggaattggtgggttcttggtctcactgacttcaagaatgaagccacggaccctcacggtgagtgttatagctcttaaggtggcatgtctggagtttgttctttctgatgttcagatgtgttcggagtttcttccttctggtgggtttgtggtcttactggcttcaggaatgaagctgcagacctttgcagtgagtgttacagctcacaaaagcaatgtagactcaaagactgagcagtagcaagatttattgcaaagagcaaaagaacaaagcttacacactggggaaggggaccggagcaagttgccactgttggctggggcagcctgcttttattctcttatctggccacacccacatcctgctgattggtagagccgagtggcctgttttgacagggtgctgattggtgcgtttacaatccctgagctacatacaaaggttctccacgtccccatcagattagttagatacagagtatggacacacgggttctccaaggccccaccagagcagctagatacagagtgtcgattggtgcactcacaaaccctgagctagacacagggtgctgattggcgtgtttacaaaccttgagttagatacagagtgccgattggtgtatttacaatccctgagctaaatgtaaaggttctccaaggccccaccagagcagctagatacagagtgtcgattggtgcactcacaaaccctgagctagacacagggtgctgattggcgtgtttacaaaccttgagttagatacagagtgccgattggtgtatttacaatccctgagctagacataaaggttctccaagggcccactagagcagctaggtagagtgtcaattggggcactcacaaaccctgagctagacacagggtgctgattggtgtgtttacaaaccttgagctagatacagagtgccgattggtgtatttacaatccctgagctagacataaagactctccacgtccccaccagactcaggagcccagctggcttcacccagtggatccagcaccggggctgcaggtggagctgcctgccagtcctgggccatgcgctcacactccttagcccttgggcggtcgatgggactgggggccctggagcagggggcggcgctcgtcggggaggcttgggccgcacaggagcccacggagggggtgggaggctcaggcatggcgggctgcaggtcccgagccctgccccgtgcgaaggcagctaaggcctggcgagaaatcgagcgcaccgccggtgggccggcactgctgggggacctagtacaccctccgcagccgctggcccgggtgctaagcccctcactgcctgcggctggcagggccggccggctgctccgagtgcggggcccgccaagcccacgcccacccggaactccagctggcccgcaagcactgcacgcagccccggttccgctcgcgcctctccctccacacctccctgcaagctgagggagccggctctggccttggccagcccagaaaggggctcccatagtgcagcggtgggctgaagggctcctcaaatgccgccaaagtgggagcccaggcagaggaggcgcccagagcgagtgagagctgtgaggactgctagcaggctgtcacctctcaagctcactgcaacctctgcctcccaggttcaagtgattctcctgcctcagcctcctgagtaggtaggattacaggcgtgtgccaccacacccggctaatttttgtacttttagtggagacagggtttcaccatgttcgccaggctggtctcaaactcctgacttcaggtgattcacccaccttggcctcccaaaatgctgggattacaggcatcagccactgctcctggcctctgtgtagttttgtttggagctgcagtaaatagtgtctaatcttttccttccttacaggctatttctccatattgcttcccagatacaaaattcataaatgtatacaagccatacccatgttacccactccctcaggccctgccaaggccttgagaaactagactcagactgtgtctccatgtagggggattgcacatagcatctttgaacttcagtttctctttctgtaaaatggggaattttgactacttagcatgcgtcatgtgttaaaaccctaacctcgttagcaattataaccactatcagtatcccatactctggtttttttagggctttcccaaggcaaatgggaagatttgctgccaagctcacttcgggaggtcaccaggcccagaacattcttgtcctcacaaattttcacttccttcatttaagaacaaggactagagtgttctcacttaattacaactgggataggtgggagggagttacccatgtgggcaacattagggaaactttttctttgagacagggtcttgctctgttgcccaggctggagtacagtggtgtgatcatggctcactgcagcctcgacttcctgggctcaagcaatcctcctgtcttagcctcctaagttctgacagcccttagggactacaggcgcacaccaccacaccccattcatttttgcatttcttgtggagatgcgttttttccatgtttctcaggctggtcttgaattcctgggctcaagagatccttagggaaacattctaccaaaccagaagtgatggatcaactcccagcaagcctttagtgggcattgttcttttcagggagctggatagaagaggggtctcggagccacaacacccgtgctgcccatgatggtagaaaagggaagtctaaaaagagtttgggtctgaactggggcctaggaaaagttaatggggcagtgattttggccttttctacccacctccttgtaataatattattttaacaatctggctgggtatgtggctcatacctataatcccagcactttgggaggccaaggtgaatggatcacctgaggtcaggagttcaagaccagactggccaacatggtgaaaccctgtctctactaaaaatacaaaaatcattcggccgaggtggtggttgcctgtaatccaagctactcgggaggctgaggcaggagaatcgcttgaacctgggaggcggaggttgcagtgagctgagattgcgccactaccctccagcctgggtgacagagggagactccttctccaaagaaaaaacctaaccgccccccccaaaaaaaaccaatcaaacaaaaaaccaatcttacccccatgacgttgcctctctctagcctcccagggtatttctgtagtctcaatatttggccttagctataagaaaatttccttaccattactctttgtttattgtgcaattctctgaagatattcttctgatggcattctttcctctccattccttgtgtgtcatcattatttcttgcttattcctgtcttgtgcttacttcctgaaatctgatctatcctttaggcctatctcagaagcctttatgaagccagcctgcacggagacactttccttctctggaacccatggcacttagctgctatggcttttgtgctcatcagcaaactggaatgcgcttccattagacttatcctttcaccttagattccttaaggcaggaactgtcctgtacttagccttgctcttgtcatgttgtatttacttgataattattccttgaatttaactggaaattccggtttggaaggagaggacatatatacacgaagcatggtatatttaaataaactggagttaattttccttcagaaatacctcctatttaagcctttgccacacaggtataggcctggaaataaaaggtgtggctaaaagctacctgctcagagaactctttttttgttgttgttgttttgagatggagtctcgctctgtcgctaggccggagtgcagtggcgcaatcttggctcactgcaacctccgtctcccgggttcaagcgattctcctgcctcagcctcccgagtagctgggactacagacatgcgccaccacgcccggctaaatttttgtgttttaatagagacggggtttcaccctgttggccaggctggtctcaatctcctgacctcgtgatccgcccgcctcggcctcccaaagtactgggattacaggcgtgagccaccgtgcccagcccagataactcttttcttcagattttctttacagattcttcaagctgtaaaataaatgaataccatctctcatcacctatacctaggaagtgctgagtaactctttcctgtggacccactgagtcagaggttcacatctggttgggcaagtagtgggtgtgatcagtgatgaatattctttggtttcagcaccagcatcagctatttatatgtcagtgatgcaaatctccatatgcagagtccttgatactgttcggagtgcttccatacccatgcccaaactggacccagcgggggtggctgccgagaaaagaaacttgacagagcaggttcaaagggtccctggtttcttgcactggaagaattagggtgggaacacagtgggagaagagaggtggaatgtcacagttctgacagcccttagcatggagatagccagcagccaattagatatgggaatcggaagcctagcagagaggatagctggagagtacatttcaaagtcactgccatataaacaggaattaaaaccctgatagtgggtgggatcgcctgggagagtacggaggaagaggaggatggattcagaatggagtcccagtgcttgggtagtgcatggaggacaggacccctgaacaggccggcaaagtgtgggtagagaggtcaaggagagagaggagaagttactgtagaaatcgataacttcaacaaatgagagagaggtcagctgtaaggtaagaaccaagaagggcccactggatttggcgtggagcaaagggatggagtgagtggagtaaaagcgaagatggaaggtggatttcagtggtgccagaggggaatggtagtaaggagagcgtagtggacatggagatgtgctgctcagatctcccccaaggaaggacttgttgcccagctatgggagagcagtcagcagacagcctccagccatcagctccttcagggtcccctggctgcaaagagctgcctggtccctcttcctggtcacaccctttctcctggcagctccatgtggtgactaagcagggctggatataaatgcctggctctttcagttcaacttgctttgctttgatagacaatactgccccaagctctctgcagagttatgagaggtgtggttgggcctgcagctcagtttaacttctccctctgcccactcctgcttccttgcccttattcacaggtgttaatacctaattaacatcttgcatcccaactttatctcagtatctgtttccagagaacatggtctccaacagaatcatgggaacaagtcttctgaagagtttgagagcaggagtcgagggacgggaaggaggtgttaaaaaattagtagggaatggtgacacgcctatagtcctagctattgggaggctaaggtgaaaggatcacttgagcttaggggtgactatactcagctcttctcggggctcacgaaacactttacaaaacatctttctgtatctcatttgagggtttttgcctacagtcattgccaaggccacttatctgtagttttcttttcttttttatttttgagacagagtctcgctttgtcacccaggctggagtacagtggcctgatcttggctcactgcaagccttgacttcctgggctcaagtgatcctcctgcctcagtcccccaagtagctgggactacaggtgtgcaccaccacacctggctaatttttttttttttcttgagatggagtttttgctcttgttgcccaggctggagtgtgatggcacgatctcggctcactgcagactccaccatccaggttcaagcaattctcctgcctcagcctcccgagtagctgggattacaggcatgcgccaccacacctggctaattttgtatttttagtagagacagggtttctccatgttggtcaggctggtctcgaactgctgacctcaggtgatatgcctgccgcggcctcccaaagtgttgggattacaggcgtgagccaccgtgcccagctaatttttgtattttttgtagagatggggttttgcccaggctcatctcaaactcctgaactcaagtaatccacctgcctcagcctcccaaagtgctaggattacaggcgtgagcccccacacctggcctgatctgtgcttttcaacattcatctttttttccatctttgggaatcagagccacacaatctccaacttctaatacctttctgcctctttgtgatttctcagagatcgttgatagtgacttggagatactctcagttaatttttattttggtacttaggaatgtaatccattcagaccaggaggtttgaacacatttggagcagctactcttgctgttattattatttttttcaggtgttatggtgattcccacttagcagtggccgttctgctgtttcctagtcaaattccatgctgcttactgataagctgggggcactggcttctgctcttgctctttcttctggaaacattattctgttcctttggacatgggcaagggtcctgtccctaacttgtccttctttttcttttgatcttaaccagtttcacttgtaccaagaccaaactttcttacctttccatgcagggaaacaggcaccatcaagatcaatgccctggtactccttatgtagtgagtgatagatgctcacggaaaatggggagaaaactaaggggtgaaagggaataactctaaaaaggacacgttcacactttctgacagcatagttgcatgttttcaatttattttggccaccagatggcataactgggctcattaagataaacaaagagaatggctactactctgaaaaaacaaaaaaaaaactctagataattaatggtgaaaatgcccctgagaaagctcatttctaattcttactcctagctggctttttatacacaggcaggggagacccatctttggaattttaaggttcaaaaaggaatttgtctgtacctgatggccagaaaaccacactgaaatcgtcaactggcatttagaattgtctgttctaagagttagaaatgagcgtgtctctacctgcttctagcacacaccttcctttgaggtaaactccttactgttgagcccttgaatctcggagtggatgaagagggtgatgagggattgtagctaatattagcattgttgagctaaaataccatcatattttgtcaggagaagtgctgactgtcctgtggaatctgaggatgagtggcattggtccctaaggattagcttgtccctttcggttacttttgaatatgatttggaacttgtggggtttgggttatgacaagaagggaactgagaaagtaaaaacattcattgcttgttttgtgcttctacatatttttgactctgggagattttaaaggtctatttctaatatttgttctaggtgcatagatttgtttattcaacaagcattccaggcaccatataggggctgggaagaaagagtaaataaggcagagttccaactttcaaagagctttctaatcttggtttttagtcccacaggggcaagatgggaatgccatgagaggctctttgattgtggcccaagggaacactcagtgcctagatgtgtgaagtgggatgcagctcctggtgaaggcagaagtcctttaaaagtttattgactgcaaagaataaaccaaaatgggccgggtgcagtggttcacgcctgtaatcacagcactttgagaggccaaggcaggcggttcatgaggtcaggagttcaagaccagcctggtcaacatggtgaaaccccgtctctactaaaaatacaaaaattagctgggcatggtggcgggtgcctgtaatcccagctacttgggaggctgaggcaggagaatcgcttgaactcgggaggcagaggttgcagcgagccgagatggcaccactgcactccagcctgagtgacagagtaagactccatctcaaaaaaaaaaaaagaataaaccaaaatgacaaagcttcttgataacatcccagcccatttcttcttcttcttctttcacttctccttctccttcttcttcttcttcctcttccccttcttcttcttctcctccttctccttctttttttttggagatggagtcttgctctcttgcccaggctggagtgcagtggtgtgagccaccccgcccagccatcccagcccatttcttatacaagaaacattgagggtttactaaagaaagaaagagacagtagaataatgggaaccacgttgcaaaaatgtaaatcgctcactggtgactgccaggattttgatgatctaataaaatgactggcatatgaggtggggaaaatgtaccctcctgtgatcagccagaggtttcagcagcagtggaagatgcataccagaaggcggtgcaaagggggattagagaggatctaaactggtatcagggattgggtgtggtggctcacatctgttatcccagcactttgggaggccaacatgcgagaattgcttgagccaggagtttgagaccagcctaggcaacatagtgagacctcatctctgcaaaagttttaaacaattagccagacatggtggtgcatgcctgtagtcccagctactcaggaggttgaggtgggaggatcactcaagcccaggagacggaagctgcagtgacccataatcacgccactgcataccagcctgggcagcagagcaagatcctgtctcaaaaaagaaaaaaaaacacaaaaactggtgtcgggaaaagtagttgggaagctatggaaattgctccagtgagaggtgatgaacatctgaattagtggcaggagtctctctgaacctattcagtttcaggggattgcttgatttaaaaaaaaaaaaaaagacaaattagccgggcgtggtggtggatgcctgtaatcccaactacttgggaggctgaggcaggagaatcacttgaacccgggaagcggaggttgcagtgagccaagatggcaccattgcactccaggctgggtgacagtgcgagactccatctcgaaaaaaaaaaaaaaaaaaggcagtggttaagggactgagtggggacagatgggagatggattttagggtaggaagggtggatgtaagtgtgaaggagaggaagaatgactctggagagaacaccagctccagtggcctgaccctaagtcctgtgtgctttctcgcatattgtgctgcctcgtcatataacgaagattccactttagtccaactcttccattttacagtgaaaggagaagattaaaacccagaaaatggaaaccctcatttatgttaaagctgagaaatcaagtgtcccttccctgatccaatcctcttccgcaggttcatgacagggtgcacattagaactacctgcagagccttccaagcggcacgtgcctggcccatccctagatccagtgaaccagaatccctgggctgggaccactggctcattccagacagtgcacaagcatctcttcctggtgcaaccttccatagcacgttccgcttggatcactttctctttctctgttttataattgtccattacatacagccactgataactgaaaaggctcgcagtgtttggatgaggaaccatatgcaaacaaataccacagttcttccttatagacccacttaactgatttgcaaacatctcactgaaaccgcaggggagaggttttagaaggctatgctccagtaaggaaaaattaatggaagtaattgttcagtaagcagttaccaatctaagttttataaaattgatactctctttatgagtgtattttagtaaaaatagggaatagcttttttttttttgagacggagtctcgctttgtcacccaggctggagtgcaatggcgccatctcggctcactgcaacctctgcctcccaggttcaagcgattctcctgcctcagcctccgattacaggcgcccgccaccatgccttgctaatttttgtattttatagtagagacggggttttgccatgttggccaggctggtctcgaactcctgacctcaagtgatctgcctgccttggcctcccagagtgctgggattagaggcgtgagccaccgtgcctggctgggaatagttttaaaacataaaaaacgcaaaagttttaaaaaacatgggttttctaaagatttcagtattccctatccctaacttttcataaagtcctgagtttcttaatcacaatgttttcatccaaggaggcttttaggaacaggaccccagggttagggcaggaatacactattgttattttaacagtctatcaactagaaaggcaaaaaaaaaattagatttttttcaatattaatgaagttgaattgttcgttgataattgttaattagttatggtgtttctgttataaattgtctgtgtctgaatttctcacacagtacaatataaaatacaaatagctgtggggtattttctaggtgctggttactgttctaagagctttaaatggagtaattcagttaatcctgcctcacggtacaataattagtctcgtatgacggaggaaatagaagcctggagaggtcaagtaacttgcccaaagtcatacccagaaaggctggattcagagactgttgccaacattttccttatttatttgcattccatttttttctattaaatataaaaattagccaggcgcagtggctcacacctgtaatcccagcacattgggaggccgaggagggtggatcacttgaggtcaggagttcaagaccagcctggccaacatagtgaaaccctgtctctactaaaaatacaaaaaatcagctggacatgatggcctgtgcctgtagttccaggtactcaggaactcgagaggctgaggcaggagaatcgcttgaatgtgggaggtggagtttgcagtgagccaagattgtgccattgcactccagcctgggtgacagagcgagactttgtctcaaaagaaaaaaaaaaaaatttaaaaactttttgtagttaaatctatgcatatattcctttcttttgttggcctattgtttcagttaatttgtttttttacttttttcccatgttttacttattactttcatatttcttgtatgatatttatcttaaaatctagttttatttttctttaagagactgggagtcttgctatgtttctcaggcgggtctcgaatttctgggcataagcgatcttcctgcctcagcctctcaagtagctgggaattacgccaccaacacacctggcttctttcagctaatttagaacatcctacccttttcagagattaaaaaatatttagatttgctcaggatatgttagatgaagtgaggatttacatctactatatgtattttcccaaatattaataattatttctcctgaaccatttattgcataatatttttctgttccattgttatatgacagcacgtttctgcctggttgtaatctcacagtggcttgatttttaagtgaacattatatgtttaactgcctccttgaggatactgaagactctttccaatgattatattcttttcacttcacctgtcatgcatcaagtgttgatgttgctggctgcctttctcagtgttagtttttatgtgttttggaatttcagcttccaggttcatttccaggctttctctgtctcccttctcttgttcctcactcctccctgcctagtggctgtgcagttgcccttcccaggggccagtgttcaggactaggtcttatatggcagtcggggctcctgccctgggataaccctgggaatgactcacatccagccccatggctgtgggtggctcagttaagcccaggtgtggtgccgtttggtaaccacgggcctccctaggccacagtcccaggcgaagttagtagcaagctatttcagtcttcttgaagagggtggaagtgtgggcaagaggggaatctgagtccctaatattttcacagtgaccatgacactggtcccccacctcagtgggcaatttaattctatctcaccactcagtactcaacaggacttgacttcccagctgcctttaactgtaccctgagtcagaacccaacaggccacagctgtagccctgttcatcttttgcatttatattcagtttctgggaatatctttggggatattctccctttgtggagcattgctttttaattttctctaatattatatctatcattgctctgtattgaaagcccctgggctagcctgtttcacttgtgtctattttttagaagcatttactgtagctttatactacatatttggggatcactaacaattttttccggtcacactctaatcactttctcaaggctggatcaggtgcgagactctgtagcagtaacctgaagttgagaattgaggaagtagtgctgctatgagaggagacctgcggtggcatccctaggatggggtgctggtggggggtgggtggcaagggggaaagggggtttctgcctaagggagtttctgctccatgccagcacttcatcagaggtcttgagccagggtggaatccagctccagggagcatatgagagcaaacaatggaagcttgacatgatcactggatgaacatctgaagtttcatatgtgatgggatctccccagaaaacaatagtgcacatcacagccaggaggcacccagagcattgtgttgctgtgttttttgaacccagtgagttaactgtccagtgttccacatcattctgacctgggtcaacagatggaggcagggcacactcttggctgtagctcgatccgcctctcctgctgcagcaggacatttctcagtagcacaggcaaggtgctccgggcaggggactgcatagtaagtggtgcctcctttgcaatataagccaaacaaggcttcctgctggagcgcctcttggctaattcaggggcatgagaggcagcatctacccttgcccaggggccctggctcccctttactatggggggtggcctgtgatcaggcccagtgggactgaggagcaaatgtggacagtcttccccggcacacatcggctgacctgcatgcccagactgtctcctggggcgcctgtacaagttggtcctagaatccaattcttcctggaactgggtgtcatttcaggacagagaataccgggagtcataaattggccctgaagcaaacgaaagtcttccaatcctgcatgacatagcagattgttttgcttggggctttggcttggtctggggcgtgcagttccatgggggaacctctggcaatcccaccagggggagccctttccccatcttggggctgtggatctcagctttccagaatatttgtgtgcatgtgagtgagcacatctgacttaatttttatattcagtatagaatcatgactcagctttccctgttaatgtagtcaacttaagctactgccatggttcaggttccatcatgcttcaaatatagtttatgactgtagttacgtagtgtggcagcaacacagggcaacttggggctggggagaagtgagcgtgtctttccctccccaaatgcagtcatttagcatcttcctcttccagagtcctgtatcccagcgatggggatcaagattcagacttaaggacaccctacctggaccttggcaaggagatttttacagtgggaatctggtccagcctctctctggccccaggcctctactgtccaccttttacaaatgccacatggtaaggagtcaactgagctaccttccaaggagctggattggtctcctggctctgcctgaccttcctcagcccctccgcaacccccacctgctcgcttctccttcacctcctctcctgttcacctgtaccttctttccttagatgtggccacactctgttcccccaggcagcgtcttcactgagtagtctttgaaccattaaccacctgcagccctatccatgttctctagggcacctgcaagaggaggaaggggaatttgctgatagccacagctgtgcatcctactggaggtgccttccggagggcagcatagttaatctagacacccagcattctcagtccacttccatggccttctcttcccattgcctgggtctcaaaaggcccaggacaatctcatgaggtggaccgagcagtatttggggagggaggatagaaaagagactgggatatctttaattaatagatactattaaaacctcctccccagcagcagtagtagggatcgttagtggcagcaaatccataggggtctgcagcaacctcaattcttgcctctttggtcacttactgggatcttattgggaaactgctgatcaccagtttcagatgtttctattgggagactgcctgtctctggtgccagctgtgaccaattattttagagagcccgttaacaactgcctgaccctcacctgatgtttgcctgacattcctgtgggtgtgtgtctggggcgccctctcctgccctgctcatccctgactagctacttactctaacaggatgagaagacatacaaaatagaggctactttaaaaaaaaaattctcagagtgtagtgtgtaaacgttcacctccactataaagacctccttgccaggggtaggaagcctttagtctgaaccttgagctccgtcgctgggatacaggactctgaagaggaagacgctaatgatgacattgagttgactccacagcatctcacaattctttctttttctaagtcatctgcatttagtatccactgaccaagcaggcaggaaatgtaattgaagttttattagggactcccctatctcttctcctatggggtccagtgaccatcccaggggtctgacccagcctagaacattcagagtctgggcctctgaccttcagacacagctgatatgaatgggagtctttgtggttagtaaggccaaggttcttagctagtttcctttggaatccctgacctccctccatccccactgttgtgtgtggggttctatgtgggagcagggcttctcctcactactccaaggacccccaaaccacatcccttccacagcatctgggaatctccccccaccccccactcccttgagcagcttttgcctccttcagtccagtgtgcttacctctctcccctggcagagaacccaggtgctgggggggtctcctctggatgccttgccaacttctttttttttctttccaacttcttctcttggtgaggctacgcaaaatcttctggggccaggatgtgcaaacgcttcctggaatggggtagaacagtgacaaaacaggaagaacaaaaaaacacatgttaatatctcaagaaagtatccagccaccataatgaaggggcttccaggctctgagggaagaccactgagctgaggggcctttgcactctattccagggaagataatggatgcccagaagaagtgggacatttggagccccagacaaaccaatgacacagactgagacactgtggagctggatgcctttctgtgtgtttgttagagtatgagaagcccgctgggaacaagtaagggcatccctaaccatcagtgtccattgcccaagagagatggcagaagtgggttggtccaaatcctttccgttgtaaatgtggagggctaacattttgaaatattctctggccaggtgcggtggctcacacatgtaatctcaggtacttgggaggctgaggcaggaggatcacttgagcccaggggttccaggctgcagtgagctgcaattttgccactgtactccaacctgggtgacagagagagacctcatctctagaaaaaaaaaaaaaaaacttctgatttatttcatctgtatctctccctcctcccctcccactccccagcctttctagcagttggggtaggagggtgggcggtcagcagaaagcagagccaagcagcatcttctgcctcataaatttcaaacatgagacctcatgggaactgaaaggatttatgacataggccaggtatttaggagaaatggacactaagaacaaccatcccctcaccttccaacagaaaggggttcccttgtgctggtggggcagaggggccataataacaatgtgcacatttgtgggtattagagaaaggggtccctgggctgagtcctggggaggtggcagaaatggcagacaggtttgtggggtcagacagaaagctctgtcttgcttcgtctttgagccaaaggggacctggtgcccctgagttgggggcactgtgtggtgcccagtcacactctccgtggtgtcctcagtgagtggcactcattgagggacaggaggagcagagctgctcccaatagagaagcactggagcccacactgcctaaagtgggaatgacccaaatagccttcagcaggagaaaggggaggaaaattgtggcatatgcatgcagtggaatatttctcagcactgaaaatgaatgttcctataactgcatgtcataacaggcaaatctgcagacataaagtcgagtgaaagaagccagctgtgaaagagcacattgtatgattccatttatataaagctcaggtccaggcaaaatggtagtagtgaggagagaggttgtcctttggggagggtagtaactaaaaggcacaggagggggcccctggcatcctgggaatgtcctttccttaatctaggcactggttgcatgcatatgctgtttgcgaaagttctttgagctgtacatttaaaattaatgcacttctctgtatgtatgttttatttatataaaaacatttttttaaaagatagaagtagctggatgcagtggctcacgcctgtaatcccagcactttgggaggccaaggcggatggatcacctgaggtcgggagttcgagaccagcctgaccaacatgatgaaaccccatctctactaaaaatacaaaaattagccgggtgtggtggcacatgcctgtaatcccaccttcctggaggctgggaggtggaggtgagctgagatcgcactactgcattccagcattccagcctgggctacaaatgagactctgtctttcaaaaaaaaaaaaaaaaaaaaggactttctgctctttcctgcttgacatcttccttgactccatcttctttttgatcacctttttatggcttcctgaattgatctcatggattttttatctgcatcaaaaatggaaatggattagatgttgcgatttttagggtataaaattcaatgattaattttatgtgtcaatttgattgtgttgcactacagggtgcccagattaaataacatttcttggtgtgtctctgagggtgtttctaggtgagattagcattgtggactcagtagattgtcttcgccagtgtggtgggcatcatctaatctgctgagagcctgaacagaatgaaaagaggaaagagaaattcactactgtttcttcccgcctgcgcgctggaactggaatatcagtcttcttctctccttggactgagatttgtactattagctcccctggttcctctggtccacaagattgtggacatagactggaattatattactggctttcctgggtctcagttcgctgatggcagactgtgggactttagagcctccataataatgtgagccaattcctcattctatctatcaatctatatatcgattgattgatcgatcgatagatcgatctatctaatctatctacttatctatctatcatatcatctactgatttctctctcttcttttttttttttttgagacaagatctcactctgttgcctaggctggagtgcagtggcacaatcctagctcattgcagccttgacttcccaggctcaagcaatcctccagcctcatcctcctgagtagctaggactacaggtgcccaccaccatgcccaactaatttttaaactttttttacagatgaggtctcactatgttgcccaggctggtctctaactcctgggctcaagcgatcctctcacctcggcctcccaaagtgctaggattacaggcatgagccaccgtgcctggccctgatttctcctattgggtctgcttccctggagtaccctaatacagatgggtttgtgttattgagagccctatttgctgcctccttcacaagatgctagctgaactcttgagcatgggcatcagcattggtaaatctggcagtaaggcctgtgggctgctcacatcagccaggcagacatttgattaagtttgagatcttgatgtcttcaccagagccactaagttttatatatgccattgttgaagccaaccccaactcacctggcaatcagctggaggaaggggactacttctattcattgcagatttaaaagttggctacatatcctttgctacttctcccattgggaggtggggaccccttaaatctgggtggctgtgtggctgctcgagcgacacaaattgttggaagtgatgctaaaccagcttccagcacaggattcaatagcaccttccacctcctgtctcctggagcattctctgggagcctgaatcaccatgtaaaaagttcaaaatcaggctgggcacggtggctcacacctgtaatcccagcactttgggaggctgaggcgggaggatcatgaggtcaggagttcaagaccagcctggccaacatggtgaaatgccgtctctactaaaaatacaaaaattagctggatgtggtggtgcgcacctgtaatcccagctactcagggggctgaggcaggagaattgcttgaaccccggaggtggaggttgcagtgagctgagattgcaccactgcactccagctctgggtgacagaacaagactatgtctcaggaaaaaaaaaaaaaaaaaaaagtttcaaattcaggctgggcacagtggtgctccgtaatcctagaactttgggaggctgaggcagggggattacttgaggtcagaagttcagaccagcctggtcaacatagtgagagtccatatctacaaaaaagaaaagattagccgggaatggtggctcacgcctgtagtcccagctactcaagaggctgaggcaggaggattgcttgagacctttaaggttgtagtcagctatgaccatgccattgcacaccagcctaggcaacagagcgagaccctgtacccctcttccccccaaaagaagaagttcaaattccctgccactgcctgctggagtggccgagtatggtactctggccaaccactagcagagcccagctgtccccacaaaggtgacaaaaatgtgaaggaagctgtcttgaacactccagaccagccagctgccgaagatggcattgagtgactccagttaacatcaagcagagtagaattgctgaactgacagacacaattttttatgtaaggaagtggctgttgttgtaagccactaggtttgggatggcggttgctcagtgatagataactgaaacagctgtatctgcacctggaccagagctttcatgcccagggtgagtagcttcttggttctgtaaggctctgtctccttcaactcactttgccgggttgcggctacagcattacccagctcttcattccattacagttcatcaaagctcccatgccaggcttgtggcagggtaatttactgtggaattgttttgttttgttcttgttgctctgtgtatactcccctcaccaagagagttactgggctttttgttcccaattctgaggctctttcttgagtatggagaaggtgggtagtgatggcatttggattatgcgcaaacacctaggctaagagaggcagaagtggactgtgggtgtgtcttgagcagaggttgagattctctagggtctggaaatttggtgctttctccccacgagtgaggagacccccacttctgcccagagcattcccaggctgaaggattgctggagaatgcccagagaagccatgatttctcccagctaggggcacagaggccagggtccccagggagattctactatgggtgatgtggacattgctgatgtgaggggaagtgctgggcctgacccagaggacatcactccaggacttgtctgtagcctctgaaagtagaggcagctagagaaacaatagtggcttctatgggctaaatgtctctgtccccccataattaatatgttgaaaacccaacccccagtgtgatgatatttggaggtggggccttttggaggtacttaggtttagctgaggtcataagggtggagcccccatgtgtgattagtgcccttataagacgagttagagaccagagctctctctcggccatcggtagtgagaaggctgcagtctgagaatcaggaagagagccctcagcagacatcaaatctgctggtacctggatcttggacttcctagtctccagaactgtgagaaatacatattcattcagctgggtgtggtggctcacacctgtaatcctagtacaggtttgggagaccaaggtgggcagattacttgagcccaggagtttgagaccagcctgggcaacatggggaaaaccccatctctacaaaaatacaaaaacttaggctggcatggtggctcatgcctgtaatcccagcactttgggaggccaagaagggcagaacacctgaggtcaggagttcaaaaccagcctggccaacatggtgaaaccccatctctactaaaaatacaaagaattagctgggcatggtggcgggcacctgtagtcccagctattcaggaggctgaggcaggacaattgcttgaacctgggaggcggaggttgcagtgagccgagattgtgccactgcactccagcctgggtgacagagcgagactgtgtctaaaaaaaaaaaaaaaaagaaaaattagccagatgtggtggtatgcacctatagtcccagctgcgcgggaggctgaggtaggaggatcacctgagcctggaaggttgaggatgtagtgaggtgacattgcaacactgccctccagcctgagtgatacagtgagaccctgtctcaaaaacaaacaaaaacatatttgtcatttaagtcacctagtctctggtattctgtcacagcagctagagcgaactaagttggctatcctgagtactaaggacctggccttgctcccagcttttctggtactgcctaagcccctggtattttgtaatgtgttggagggaggagacagccccactaatgactagggttgaatttcctcccagtcttctgggtaggacacagagcagattacatttgattgagtaaaagtaaggaatgtgacatttcatgcacattttatagccccaaatgacaaaaataacatgcttctcaagccacctggaacattttatagctttctgttttttttgcattgtaggctcctgtgtccatcaatttatcagcatttttcttggcaaggattccctgaaatgtctccaagtttggaaattttgtctttatgaaaagtggggcatgggaccagaggagggacttggtcagaaaaacaaaatacgattatttttgatccatgtccttatttcttggttactaaatagctgccctctgtatttctttgattttaataaatcgtccagatatggatttttaaaattctatgtatgttttttgagacagggttttgctctgtcacccacgctgaagtgcagtggctcactgaagccttcaactcttgggctcaagcaatcctcccacctcagcctcatgagtagctgggactacagctatgtggcaccatgcctggctaatttttaaaatttttttagtagagacaaagtcttgctatgttgccaggctggtcttgaactcctgaactcgtcatcctcccaccttggcctcctaaagtgctgggattacaagtgtgatccaccacacccaggcctagtttttaaaatgatatttcatttatgtagttcaaataaaaatgacatcaataagtacatgagaaatatcactcctaccccacacttaccctctctttttcccctcacattgctcgtcagtaaccatttttaccagaatagtgccttatttattctcccaacgtttctttatgcaaacataaataacatacttttatttcctcttttattacacaaaaaaagcatgttatatacatcttgctccttccttttaaaatcgtaactaaatatactgggtatccttccctatcaccacgtaaagctgttcctcctgcctttttcattttgacagctctatagtattccattggtggatcgaccagagctgtgtgttcgccagtctcctattgctgggttgttgggctgtttctgatccgttgttattataaataatgccacaatgaataaccttatacctaagcaagtttacctttgtgtaggtgaatctataagatagattcccagaagggggatctctgggtcaaagggtttgtgcatgtatagttctggtagatattgcaggtctgctccacagaactgtgccatctgcactgctgccagcaatgcatgggacagtctgtttcctctcagcctccttcacacactgtgatatcatattctggactcttgccaaccaaggaaagatttatgtataagttcaacatggatgcacttaggctaattctccttcctgcatttccttcagaacatcctcagtctcctcactcatttcagataccttaattagcttccatttttcatgacacaggttagccatgtttatatttcctttgtgatcatcacagttatgaaagatttcttcttgggttgataggttaagtaaccatggtccagtattggttattgcaatcaaaccaacagctacaggtggcttggattgttttagatggaattggtctcaaatttaaaaggtcactttgtcattctttgtatcattgttattcatgtctgtatcttttacaaatatatttatttaatatttaataagacaaataaaatgttaaaaattattttgtcctgggaaagcccaagccttcctgcacagaagttgaaatattcaaaggacaagaaaaggcctctggtacggtcctgtcttggacagtttccccggccacccagcaggctgcctattgtgctgtttgagatgcaaatgatctcttcttatgctggggaaccttctaggcatggcaggggcagtggagaggctacttcctctctctctttttttttttttttttttttttttttgagacggaattctcactctgttactaggctggagagcggtggcatgatcttgacacactgcaacctctgcctccagggttcaagtgattctcctgcctccgcctcccgagtagctcggactacaggtgcatggcatcacgcccagctaatttttgtattttcagtagagacggggtttcaccatgttggccaggatggtctcaatctcttgatctcgtgatctgcctgcctgagcatcccaaagtgctgggattacaggcgtgagccaccgcactcggccacttcctctctttttttgcccacttctctagctagtcccaagacttgttcaactctttcttatggatggttttgcagaatacatacatggaaaccgtccacaaattctagcccaccaattaatgctgtcagactgggaacttcatgaaaagcctgcttgaaacaaaaaattgaaaataagtggcttaaacaaggtagatatttatttctctgctttatccacgaggtctgagatgaaacgtccagggcaggtgtggaggctccctggcatgatggacccaggctcctgtcttctgttcctgtcatcttagtgtgcttccttctacccttagggtggcctcatggtctgagatggcttcaggactctccacttcaggccttttggagtccatgatttcttttcttttttttttttttgagatggagtttctgtcttgttgcccaagctggagcacagtgatatgatcttggctcactgcaacctctgcctcccaggttcaagcgattctcctgcctcagccgcccgagtagctgggattacaggcacctgccactgtgcctggctaatttctgtatttttagtagagacagggttttaccatgttggccaggctggtctcgaactcctaacctcaggtgatccacccgccttggcctcccaaagtgctgggattacaggagcgagccaccgcgcccatccatgatgttctcatggccaacatcctgaggtctcccaaaggcaagggcttctttgcttgcccactggtttgggtacagatatatttgtggactctggagtccaggtgtcagggtatagcttcctgaggtgccccaggcagctggtctcctctgaggccttgatgatagcccttgacatgcctggggctgtggagctggggatggtctccaccccacagggatccacctacctcagccggtatccagtccagggcctctgtcttcttggctgccctcaaggcactgggctcctttagacactccccaccacacccttaatcctctcagggaactccagtctccagcaaacaaaggcctgaaaagtgtctacaaggaaattctgagttcaggtttctgaggtgaaggagcacaaagtcctttctcctggcttggaagtgcagggtggtgcgaagagtgggagggaggcagggttaggtgaggaaaaaacagaaaacacaaattaatttgacaatgatatgttaacttaaaaatcacaactttaggctgggcagacagtggctcttgcctgtgatccctgcgctttggtaggtggaggtgggaggactgcttgagggtaagagttcgagaccagcctgggcaacatagtgaggccctttctttaccaataaataaataaataaataaataaaaattagctaggtgtgctggcacacgcctgtagtcctacctactcaggaggctgaagtggatcccagtagtttgaggctgcagggagctatttactccagccagggcaacagagtgagaccctgtctcttaaaaaaaaaaaaaaaagaaaagaaaaatcataaatttggaaaggagagctttatttcttttaaagagttactgctgactgggcattgtggctcacatctgcagtcccagcactttgggaggctgaggtgggtggatcgtttgaacccaggagttcgagaccagcctggcaatactgatgcagaactttgctcctcagttcagctaaaaccgggttcttgtcacatgaccaggaaaagttaagcaggcagacactttgaagggtgaggggaatggaattttttgggtgaaaaaggaaaagaagaaaagaaaaacctctcagcaaagagcaaggggggttcctgccaacaggtccccactccacagattgattccaggccacacacagtagctgaagaggccaggctcctccccgaccactgcacactcggcacgaacttcccgtggctccaccccattttcccagtatgcaggcaggtgattctccagggaccctcccctttatctgtctcctgcatctatcattatctattttattttatacatttaaaacactattctgccgggtgtggtgacctgcatctgtagtcccagctactcaggaagctgaggcagcaggatctcttgaactcaggaggtggaggctgcagtgagctatgatcatgacaatgcactccatcctgggcaacacagcaaaaccttgtctcaaaacaaacaaacaaaaaacaaaaccccaccattattctcagaagtacagcagctttcacaaattgccaaaggggtctgttttaggttagtttccttcagaagcagatctggagacaaagatttgaagcaaggaggttattagagaggaaatccctggcataattgataaagtagacaggaaagggcagaagccagcatggggtgcatcgatgagcaatgaacttaatgaactccttggctcaatcccactgggaccttcaagagactactgtatagagcatgcctcggagtcatcctacccttgaggaagctggggtatttcttcaccaaatcccatttcacttgagggctgcccccagggcactgacatttctagcctgccctacccatgggtagtgctcctgtgactagggtaagtcctcaacagtgtcagaggcttaaagacggagccatctgaatggcaaccttagaggacaagtgggtagggcacaaagtttggctacaaggcctgcagcactaaaaggttaggaacgcctcagagctgccccttttaggatggacccactcagctccccggttcccactccctgacatctgctttctgtccgctgctcagtgtctccagtggattcacaaaacaactgcctttctccctttccacctcagttcattatcaagaacaaccctggggtttcccaccttaatcaggctgctccggcctctgcccacagcccttctgacacctggtttatgtgtgaccctgccacccttaacctccagcagcaggggatgtcagctttctttcagggaagaacacagactccttttgagagactatagtgagataattttgtaaactgaaaataaaatcctaagccccccagttgacttaatggaccccctcttggccaaggggaccccagagaaaccttaaaaactgagttcccaggcaggagaggatgggaggtcagacacgcctcgtcatacctcatcccttttgtggtttagacaaccactgaccagcattaataaaccagagatcataagactgacagaacaaagtatttgagccaatgaaagaccaaactataaacaagacttaaggccatggcaggtcagggttaagtcacacacccctgcacttaaagaaaaagtgttctgccacaaagttttaatttttctctagcagccaaacgaacattggccttgagataagcaagattaaaacaacttgcagatcgtccatcagccaaaactacagcttgggttgaacacgagactgatttcagtaaccttctcctgataagaagactactgaccatggactggttctggctggtttacagatgctgcatacttgagtttgcttgtgtcctgaaaagaccttttgatgtataagacctaattgtaatacatttatttttttttaattaatttattttttttttgagacggagtctcactatcgcttaggctggagtgcagtggtgcgatctcggctcactgcaagctctgcctcccaggttcatgccattctcttgcctcagcctcccgagtagctgggactacaggcacccgctaccatgcccggctaattttttttgtatttttagtagagacggggtttcaccctgttagccaggatggcctcgatctcctgacctcatgatccatctgcctcagcctcccaaagtgctgggattacaggtgtaagccaccgcgcctggccagctgtaatacatttaaatgctaagtctccaccctacggtgcacatgggtcatatgcaatatactagtttattcagtatatgtgcttcaggaccactttcatgaatattcatagctccttctgtaacctgttgaatatgtatacttggccaacccagtcagattaaattcctttcttattcctcctcgtccctcaaagttcattctctaggctctgccagaggctatgcttcccactagtccgaatggtacattgtaggctgcaactctttatttttattttatttttaaatttatttttgagacacggtctcactctgtcacccaggctggagtgcagtggtgcaatcacagctcactgcagcctcgacctcccgggctcaggtgattctccaacctcagcctttcaagtagctgggaccacatccgtgcaccaccaggcccagttaactttcacaattttcgtggagacagggtttcaccatattgatagatgcaggaggtagataagggaaagggtccccagagaatctctgacctgcctatgaacttgggagaagggggtggagccacgggaagttcgtgccatgtgcagttggggaggagcctggcctcttcagttcttgtgtgtagcctggaatcagtctgggggtgggggtgctgttggcaggaactcttcttgctttgctgagagattttttttttcttcttttcctttttcacccaataaattctgttcccctcacccttcaatgcgtctgcgttcctagcttttcctgcttgtgtgacaagaacctggttttagggtttaaggaacaaagttctgcatcaataagattcaaaagaaatcattctattgaaatatgattctaggcacaggctagttgggggtctctgagccccagatcccacagctgtgctgagatgcctgcccacaagctcaaggagcatgtctaggagtccacggaggcaagcagaggcaggaagaggagaccagaattcagctgccggtggtgagcctcaggaaactctttatcaaagcctagaaaagccaaaggtgggcccgagagggaagaaagagacaaagagatgggaagaagatggaagtaggacacttagagtgggaaggaaaaagagcaagagaaagtgagagggagcagcagagccctgggaagggagcttgaaggggtggggcacgtttggaagcctctgtgattatttggggaaggctgattttctagtgccttgggctgggcccatgcaggttacttcctacccagctaccttcctggctcttctgcccagggagctccttctgccagtccccagcctactgcacttcttccttatatgcttggagtgtgtggaatgctgctcaccactctggggcagttggagactgagataactccctccctggaatgtagggaatttggtgtgctggaaagagagaaagagagagggagacagaatgtaccttgcagcagcacagctgggttctggatgggctccatctctgaaagagaggggcaaaagggttggggaaggggtagctgccggtcttagtgaagggtccccgaggcactagcgtgtcctcacatttgtgctgcctgcttcccagaagactcagcacatggggaaagtggtgccaagggcacacccaccagccacactgtggagcttggacacctggggcaggatattcagtagtcggcctggggacctccaaagatgctttcccattccttagcctgtcagccttggtagggacatcactttcctccttatccttcaatgaggacattcaagacaacatccctgagctggaggaaacccagcctcacctcctccttccacccctcatctcctaagctccccatcggtggtgtctggggtgtggaacgtggggaggcaaggaagacagctcacctggcccaggcttcaatgctcagcccctcttattccttctagcaagagcttcttgcaaatacctcaatttttttttttatcttctgcagctgatgctcaaactgtcaacttgttacttgagaccatgaatgttggttataagaatttgttgactttttaaaaaaataaaaatgatgtttgcccacttaaagttttaaattctgtttttcagaggagttttttttttttttttttttgagacagtcaccctctgttgatatggctctgatgagtggaggaacaccagggctcttgtctcacatcgaattagataagatgacacgaacacacgtggagtggttttaaggagcggagagtttaataggcaagaaagaagggagaagaaagaaagaagaaactcccttgtacagagacagagggaggggggctccaaagccgagagatggaaccccgcacttaggtaataccagccagctatattcgatgggtggaggaggcagtatctgatctgcataggactcaggggattggtttgaccaggcatgtcattcatgtagccggcgaaaaagctggccctcccaccctagccttttaatatgcaaatgtagggctgtgtcatgttccacacacgtggggatatgtgggggcggccatgctgccaggcacatgtaggggcaagggcaagaggacaaaggtgggaatagccttgttgggtggacccagtttctaacagctagcgtttgcatataaaaggttgctggcccaagtctaagagccagggctttcatgctagacaagagctgtgaaaaattttccatggacctttttcctctctatctgcctaaaataatttcttaataactcctacctcactgtagcctaggttggagtgcagtgtggcaacatctcggctcactgcaacctccgcctctcgggttcaagcaattctcttgccatagccacccacatagctgggactacaggcacccaccaccaagcccggctagttttttgtattttagtagagaggggtctcaccatgttggccaggctggtcttgagctcctgagctcaagcaatccacctgccttggcctcccaaagtgctggaattacaagcatgaaccactgtacctggcctttcataggagattaatggctgattttacccaccaacctggtgatcatgaaccagccatctataaccttgttgatctagctcaacccattatataaaactgtgcttggattgtatggaatgctacacacttacaattaaagatatttagagctgggcatggtgggtcacacatgtaatcatagcactttggaaggccaaggagggaggattgtttgaacctgggatttccagagcagcctaggcaacatagtgagaacccatttctttttttgtcttttcttttcttttcttttttttttgagatggagttttgctcttgttgcccaggctggagtgcaattgcgcggtctcagctcactgcaacctccgcctcctgggttcaagtgattctcctgcctcagcctcttgagtagctgggattacaggcacgtgccaccatgcccggctaagtttttgtatttttagtggagatggggttttaccatgttggccaggctggtctcgaactcctgacctcaggtgattcacccccctcagcctcctaaagtgctgggattacaggcatgagccaccatgccaggtgggggtaggtggggaagcccatttctattaaaaaaaaaaaaaaaaaggccaggtgtggtggctcatgcctgtaatcccagcactttgggaggtcaaggcaggaggatcacctgagatcaggagttcgagacaagcctgcccaacatggtgaaaccccgtctccactaaaaatacaaaaaattagccgggcatggtagcacgtgcctgtaatcccagatactcgggaggctgaggcaggagaatcacttgaacccaggaggcggaggttgcagtgagctgagatcctgccactgcactctagcctgggtgacagagggagactccatctccaaaggaaaaaaaaaaagagaaagtaaaatttgtacttcaattcagagattataaacaatgtatacttgactttgtggcagtgatcactattgtacaatagttacttaaactcaggaggcagaggctgcagtgagccaagatagctccactgcactccagcctgggtgacagagcgagactctgtctcaaaaaaaaaaaaaaaaaaaagttactcactcatttgttctgcagaatctatttattgctgtgttcacagaaaaggaagcatcaagacggcaaagctctttgatgaaaagccaggcgtactcacacacacaactgagaaagttctggaagtaggagaaaacgtctttaaggcatataggctaaacttatataaatattgttagtgtttgccaaaacagggataatctagtaaaatcagagatacaaagccagaacagagaattggtaagtaaaaaattgttaagaatgtatattggctgggcgcgatggctcatgcctgtaatactagcactttggggaggctgaggggggcagattgcttgagctcaggagtttgagaccagcctgggcaaccctttcactactgaaaatacaaaaaaaaaaaaaaaaacaaaaaaacaaaactgggcgtgctggtgcgcacgtgtggtcccaattaccctggaggctaatgtggaaggatcgcttgagcccagagcgtgggggtgggggttgggaggcaaggttgcagtgagcctggattgcaccactgcacttcagcctgggtaacagagcgagaccttgtctcaaaaaaaaaaaaagtatcaaaaggcctaggaatttgttctccaggtaaatctgccctccctcatctctaacctttatgaaatcacccaaatggagacatcacagcaaggccccgacaaggaaatgacaggaatgtaggtggataagggactggaatagtgcagcacaacactaactacaggtttcagccccaatgagattgccctcacttccgccgccagccacaagtgtggaggtccccaggctactcgctcctctgaccaactggctactaatctggggggtacccacaaccccctcgggtttgataatttgctagaacaactcaccaaactcaggagaatgttatacttacgattacaggcttgttacaaaggatacaaatcaggaggaccagactaatgaagacacacgtagggcggggtctgggcgggtcttccatgcagagcttctgtgtcttctctctgtgaatcaggttgtgtcaccctcctggcacatggatgtgttcaccaaccaggaagctccaccaaattttggcgtccagagttttcattatataggtacaattggttgactcatttgccaccgaattgaacgcaatctctagtcctcccaccctccgtcgaggttgggctggctctaaggcccaatccttttattatgtgatctttctgatgaccaacctcccatcgtgagttctctcttagcataagcccaggtgtgatccaaggggctcatgaataacaaagatactcatattactcaggagattccaaggatttagtttccctcctaggaaccagggacaaagggcagtcaaattctttattgttatcacagagacacagtaatataatatgatacagcagaagagaggtgaagaatgttgccatgccttgagaagcctatcacaagagctttaaggaattcacacttaaatattaataggtacattatgaaagaaatcagccaagtacagtcttttcttattatggaatctagttattgcaggaattgaaaaattgatgtaataaagcctagaatgcaataaaggaatcggcattcaagtagatgagagaggttggggaatatgtcaagatgcaaaagtgagagagctgtcacagtttacttactctgcaatctctgaggatggaacaggatcaaagatgaagccaggaagcacagagtagttttcttcctccctaatctcatcccttgttttcatttggcactttaaaaaatttccacatttatattcatatggaattgattttgagtatagagagataattctaattattattgtttttcaaatgttagccagttgaaccatttatcataatcaaggtgatcatatggcttattttctttggcctacagagatgataaatttgaatatattttaaaatataaaactatctttaaaatttgaatatatttgaatatgatacatttgaatatattttaaaacatagtgctatctttgtactcctggttagtcatggtgcatttttttttaatacttcatattaaatttttaccttctggattgagacactagagttcttaaaggttctttcagaaattcttcctatattcagtatgctaccagaaaacctcttacaactaaccttacagaagatactgttttctttgtactttgtccaatatcaaaggaaacctccaagttccaaggaggtcaggctactaatacccacaaatgaattctgatgagatcattacacaataaacaataactgttgcttattacatgcttactttgtactaggcaggactaagataagtattatttaagttttaagatcattcttaatttcttgtcaaaagtatactggtttgcaaagtaatgaataaaataaatctttaacaatatccctatagtaaagacaatggtgaacttcttatgcctcttttaaaaaactctgcttatgatgacaatttcaaacatacacagaagccgtgagtatataatgagtcttgctgtatccatcacaaagttttaaaaactgtcaaaagttgaccatactcacttaatctactcctaccactttttcagctggagatcttttaaagcaaattctacacattgtaccatatcatccataaattattttgcattacatcccattcttattgagtccctgcaagctgagagccgactgccaaagcacaattcactgtaagagattctgtgaagggttaaaacaaacagtccaaattcacagtgctgcaaatgtctgtaattgcataatctgcaaaatatattcttcaagaaatcctctgtgcacttggtttcccttaactgagtttttttttcttcttcagaccagattaattgatgagaactgacaagcaggggagagaggtgatgtttaaggttatatattttggcaaaaaattatgagtgtaaattgtgcttgtttctgattaagagaggtccattaatcagaaagtagacttggcatccttgtagaaaaatcacatagcttaacaagaattcatgactctgaattgctgcacagacaggtagcatgagttcttggcaggattctttcagctgagctgttttccattagaatggtgtctgatatggtttagctgggtctccacccaaatctcatcttgaattgtagttcccttaatccccacgtgtcatgagagggacctggtgggaggtaactgaatcatgaggggcaggtttttcccatgctattcttcttgtgatagtgaataagtctcatgagatctcatggttttataaaggtagttctgcacacgctcttgcctgctgccatgtaagacatgcctttgctcctccttcatcttccaccatgattttgagggcctcctcagccatgtggaactgtgaatgcattaaacctctttttctttataaattacccagtgtcaggtatttattcatagcagtatgaaaacggactaatacggctgggtgcagtggctcatgcctgtaatcctagcactttgagaggccgaggcaggtgaatcatttgaggccaggagttcaagatcagcctggtggtcaatatggtgaaaccccatctctactaaacaaacaaacaaaaaaaattagccatgcatggcggttggcgcctataatcccagctacttaggaggctgaggaaggagaattgcttgaacctgggaggtggagggtgcagtgaaccgagattgtgccaccgtactccagcctgggtgacagagcaagactgtctcaaaaataaaaataaaaaaagaaaatggattaatacactaaattggtaccagtaaagtggggtactgctataaagatacctgaaaatgtggaaatgggtaacaggcagaggttagaagtttagagggctcagaagaagacacaaaaatgtgggaaagtttggaacttcctcaagacttggagggctcagaagacaggaaaatgtgggaaactttggaacttcctagagacttgttgaatggctttgaccaaaatgctgacagtgatatggacaatatttgtccaggctaaggtggtctcagatggagataaggaacttgttgggacctggagtaaaggtcactcttcctatgcaaagagactggcggtattttgcccctgccctagagatctgtggaactttgaactgaaagaaatgacttagggtatctggcagaagaaatttctaagtggtaaagctgttcaagtggaagtagagcataaaagtttggaaaatttgcagtctgacgatgcgatagaaaagaaaaacccattttctagggagaaattcaagtttgctgcagaaatttgcataagtaaagaggagtggaatgttaatcactaagacaatgaggaaaatgtctccagggaatattagagaacttcatagcagcccctcccatcacaggcctggaggcctaggagggaaaaagggtttgtgggctgggctaagggacccctgctctatgcagcctggggacatggtgccctacatcccagctactttagctccagctgtggctaaaaagggccaacctacagctcaggccattgcttcaggggttccaagccccaagccttgatagcttacaaatgtgctgggcctgtgggtgcacagaagtcaagaattgaggtttgagaacctctgcctaggtttcagagcatgtatgtaaatgcctagatgtctaggcagaagtttgctgcaggggtggagcccttatggagaacctctgctagggcagtgcagaagggaaatgtggggtcagagcccctacacagagttccccaccggggcattgcctggtggagctgtgagaagagggccaccatcctccaaaccccagaatggtagatccaccaacagcttacaccatgcacctggaaaagctggagacactcaacactagcccatgaaagcagctggaaggggggctgtaccctgcaaagccacagaggcagaactacccaatgctgtgggagcccatctctcgcatcagcatgacctggatgtgagacatggagtcaaagggggagcattttggaacgttaaggtttaatgactgccctactgtatttcagacttgtatggggcttgtggcacctttattttggccaatgtatcccattggaatgggtgtatttacccaatgcctgtacccccattgtatctaggaagtaactaacttgcttttgatttacaggctcataggaagagggacttgccttgtctcagatgatactttggagttggacttttgagttaatgctgaaatgagttaagactttggtggactgttgaaaggcatgattgtgtgttgaattgtgaagacatgaaatttgggaggggccaggggaggaatgatatggtttggctgtgtctccacccaaatatcatcttgaattgtagttcccataatccccatgtgtcatgggagggacttggtggcaggtaactgaatcatgggtggcgggtttttcccatgctattgtcatgatagtgaataagtcttatgagatctgatggttttataaagggctgttcccctgagcatgctcttgcctgctgccatgtacaacatgcttttgctcctccttcactttccaccatgattatgaggcctccacagccatgtggaactgtgaatccattaaatctctcttccttccttcccttccttccttcctttccttctttctttctttcttttcttttcttttcttttcttttctcttctcttctcttctcttctcttctcttctcttctcttctcttctcttcttttcttttcttttcttttcttttctttcgagtctcactctgtcacccaggctggagtgcagtggcatgatctcggctcactgcaacctccatctcctgggttcaagtgattctcctgccttagcctcctgagtagctgggattacaggtgtgtgtcatcacagctggctaatttttgtatttttagtggagacgaggtttcaccatgttggccaggctggtcttgaaattctgacctcaggtgatccgcctgcctcagcctcccaaagtgctgggattacaggcatgagccacgcgcccagctcagaattataaattacccagtcttgggtatttcttcatagcagtatgaaaatggactaatacattatctcttggaagtgaatggccagagtgaaagaaaccagaaaaaaaaaaaaaaaagaagaatacatactatatgatttcatttatataaaactctaggagaagcaaataatctacagtgacagaaagcagatcagtgagtgtttgagaatgggcatggcaggagggaaggaagtataacgggcatgagaaaacttttgagaggtatggatgtattcactatcttgattgtggtgacagtttcatagtatacaaatacgacaaaactgatcaaagtgcacactttaaatctgtgcaattatgtctcaataatttttttttttaaagaatagccaaggccgggtgcggtggctcatgcctgtaatcccagcactttgggaggccgaggcgggcggatcacgaggtcaggagatcgagaccatcctggctaacatggtgaaaccccgtctctactaaaaatacaaaaaattagctgggcaaggtggcaggcgcctgtagtcccagctactcgggaggctgaggcaggagaatggcgtgaaccccagggggcggagcctgcagtgagctgagattgcgccactgcactccagcctgagtgacagagcaagactccctctcaaaaaaaataaaaataaaaaaataaagaatagccaagtggtagaaagcctgcagatgctgttccagagctgtgcccacagctctgggcccaggtcacaggtataacctgcaataagaagagacaagagtctgagggctgaccatctgtgggcccacaagttaaggaaaccaaagtttgggtgcacaaatcattactggaaagggatcctgatccagtcacttctcaagagagggttcttagacattgtgcaagaaagaatttggggcgagtccacagagtaaagtgaaagcaagtttattaagaaataaaggaataaaagagtggttacctcataggtggagtggctctgagggctgctagttggctatttttatgattctttctttcttttcctttttttttttttttgagacacagttttgctcttggagtgcaatggcgcgatctcagcttattgcaacctctgcctcctgggtttaagcgattctcctgcctcagcctcctgagtagctgggtttacaggcatgcaccactcccagctaattttgtatttttagtagagatggggcttcaccatgttggtcaggctggtctccaactcctgacctgaagtgatctgcctgccttggcctcccaaagtgctgggactacaggcatgagccacagcgcctagccaattatttcttaatcatatgctaaacaaggggtggggtatccatgaattttctgggaaagggatggagatttcctggaactgtgggttcttcttccttttagatcatatagggtaactctgggacattgccatgacatttataaactatcttggtgctggtggggggtgacttttggcatgctaatgcattataattagcatgtaatgggcagtgaggatgaccaaaagtcacttttgtcaccatcttggtttgggccggcttctttactgcatcctattttatcagcgaggtctttgtggcctgtatcttgtgctgacctcctatatcatcctgtgactaagaattcccaacctcctgggaatgcagcccagcaggtctcagcctcattttacccagcccctatttaagatggagttgctctgattcaaacatctccgacaaaaccactgattgggtatagagtcccaaccagccagttattgaaattttgtttttttgttataacagcctagcctaatctaactaaagaaagggggatcaggaagcaactttattttcacttcaccgtgtccctttacatccattttgtgggatttcttctccttttgccccaagatgaaatttggagcaagccccatgaactttctagtcatttgtaggtaatctaaggtcattgggttactccaattccccaaggagtttaataagtaattaaatggtccaatctcatgtaatagtagaaactttaaactttatttaaatttgagatttcttcccgtactttatgctatttacagaccagccaccctcaatgggaattgaggtgtgtggtgacctctgatttcccactttgcgctttgtggcagaaattgcagttatcaccaaatattcattctcctcttcttcctgattagtaagactcccaaatttttgctggacttatggccagcctgaaacaagactacattttccagtatcccttgcagccaggtgtggctgtgagactaacttttggccaacggatctgaatcagaacaacataagcaaccttttgttctgccctcaaacagcatgggtggcattagtttcccctttccttctttccctggctggaatgctgacccagcagatgtggggagccatttcaacctttcaagagagagcagccctcgatgcaatggcagagcagcaagacagaaggagctggggtctccaacaccgcggagtcactctatccagcctaagactcctgatgttggaactgttaatgagaaacacactttgtcttttgacatacagtttttctctcagctgctgaacctggattctacctacacaggttcattgtgtatgcatgcttctatccctcctccctcatcttgctaacttggaccctggacctctccagggttccagtggtgagagggaggggccaggaggtatcattgcactagaattactgtgagatggcagaagcactgcctgggtcatcaggcatagctgattcttcctttcatcaggcacttccgttgatttttctgagctaacaccttccctttgctacgatttctcatcacctaattccctgaggtggacaaatgcccttccttaggctggtcaactatatttctttctgcagcttctaagagtctgacgattcatccctctattaggatcaccaaaccccttcagatgacccttttagacagagtctaatgccatcccctgccatctctctcttatggtggccccacctgtggtccacaggaaacatgaatccagtgcccccggcaattgcggaaggctggcagccctgaaacccagctacctcccttgttccaccatcagggcaggtagccagactcctggtgttcttttttgttgtgtgtgtgtctttgtgtgtatatgtgtttttccatttccagaaatgaaccagctagctgctcaccctgtcctccaaattgcaggaacatatattcagctccctgacgggtaccaccaaaggccctttcctggggctcgaagaaataccctcactgaattcaatttcctcaagtaattgaagatcttcccctttcccctttcctgttccactcgatggcccccactttatggggacactcccaggccggggactgcagagttgctctgctacttttggactctggtccatctcattttttccccccctctcttccatttaagaggagattcaacctttttagaagctcactgttttgagtaagagccactgtttgccagatcccagccccctctgcctctaccatctgcctcatctcttctatagctgcagaggaattaacatcctcggaagatctagtgaagctgccttcactttctctttctgccttcatatttctttttcagcccacctcaacctgaggccacaggcagctgggctccaccagtgccactgccaccatcccaaaaggccaggggctctcatcccagtagtagtaattaatctgtcatgcacaattcatagtatttcaacattaggttccaaataagtaacctgagcatccctgggtcttgctaacctatgggaatgtgcaaatggggccaccttaagatagtaacaacatttcagtgtctccttctctgcccaagtatttctgggggtctgagggaaatctcactcgtgctcctaaatccaggcacccaggccaacagcaactctccatcgcctgctgagcattcccccagggaaccggagcccttcaggcatcaattctgcattgggcagagcagtgtctatgtccagtggggaaatgcctttcccctcttttgtgttcctgttcacgaaggggccacccaagcaatgctggtgggctccagcattgtgcagagcttgtagaaccacagcttctatgttgaccttcagctttctttttgcttcggatggaggcaggactggactaaatgtggtgacaaacaacattcatttactcttttattcaacacatatttcctaaattccttatccatgctagccacatgatgaacatgataaacaagataaacgtggtctctgtgcccatggagtttatggtttggtacaagatcaaaaagcggtatacacatacacaaacacgaacaaaaaagcagttatgatttaatgtccaagactttgttattggttcaagtttatcatgcatggatgcttcttctgcttggatgagttttgtgcgtgcagcttgtcaactctcaggcaaacaaacagaccctgtcaacccactgcgacctcactgctcccgggctgcctgctggggcccagtgagggaggttaactcttactgtgctaaagtgtctgatttgtttcaacactctaacaaccaaagaaaacactgattgtatctcttaaagagcttttcttccttccccattccacactatgaatttatgaattccaaacttcacactttatgtaaatttgaagcttctggccaagcgtggtggctcatacctgtaatcctagcactgtgggaagccaaagcggatgattgcttgagctcaggagttcaagaccagcttggacaatgtggtaaaaccccgtctctaccaaaaatacaaaaattagccaggcatagtggcacacgcctgtaatcgtagctactgggaggctgaggaaggaggatcactggagcccaagaagtcaaggctgcagtgagccatgatcataccactgcactccagccttggagacgcagcaagaccctgtctcaaaaaaataaaataaaaataaaataaataacatttgaggcttcttcacttactttgtgccatttacaggccagctgctcctggtgagaatggaggtgtgtagtgatctctcacttcccactgtgtgctttgtggcagaaactgctgttgtccccaagtatccattctcctcttcttccttactaatgagactcccaaatttttgctggacttgtggccatcctgaatcaagactacatttcccagtatcacatgctgtgggactagcttttggccaacatgatctgaatcaaatgatgtgagcaaccttttgttctgccctcaaatggcaggggtgatggcaaaaattctggcagcaaaaatggatgatgtggccaggcatgctggctcacacctataatcccagcactttgggaggctgagatgggtggatcatctgaggtcaggagtttgagaccaccctggccaacatggtgaaaccccatatctactaaaaatacaaaaatgagccagatgtggtggcacccacctgtagtgccagctactcaggaggctgaggcaagagaatcacttgaactcaggaggcggaggtggcagtgagaagagattatgccactgcactctagcctgggcaacaaagcgagactctgtctcgaaaaaaaaaaaaaaaaaaaggatggtgaaggcctatatattagtctgttttcatgctgctgataaagacatgcctgagactgggtcatttataaagaaaaaggggtttaatggactcacagttccatgtggcaggggaggcctcacaagcatggcagaaggcaaaaggcacatcttacatggtggcagacaagaagagaatgagagaccaagtgaaagggatttccccttataaaactacccgatcttgtgggacttactaccacaaaaacagtatgggggaaaccactccctgtgattcaattatctcccatcaggtccctcccacaacacatgggaattatgggaactacaactcaagatgagatttgggtggggacacagcccaaccatatcattctgccccagcccctcccaaatctcatgtcctcacatttcaaaaccaatcatgccttcccaacagtcttaactcatttcagcataaacttaagagtccacagtccaaagtctcatctgagacaaggcaagtcccttccaactatgaggctgcaaaatcaaaagcaagttagttacttcctagatatagtgggggtataggcattgggtaaatacagctattccaaatgggagaaattggccaaaacaaaggggctacagtccccatgcaagtccaaaatccagtggggcagtcaaatcttaaagctccaaaattatctccattgactccatgtctcacatccaggtaacactgatacaagagatgggttcccatggccttgggcagctctgcccctgtggctttacatggtacagcccctcttctggctgctttcatgggctggtgttgagtgtctgttgtttttccaggcacacagtgcaagctgtgggcggatctaccattctggggtctggaggatggtggccctcttctcacagctccactaggcagtgccccagtggagaccctgcatgggggcttcaacctcccattttcctcccgcagtgccctagcagaggtcctccgtgagagctccaccgctgcagcaaacttctgcctggacatccaggtgaaatctagttggaggttcccaaacctcaattcttgacttcagtgcacccacaggctcaacaccatgtggaagctgccaaggcttggggcttgcaccctctgaagccatgacccaagctgtaccttggccccttttagccatggctgggatgcaggcaccaagtctccaggctgcacacagcaggggggccctaggcctggcccacaaaaccattttttctccctagtctccaggtctgtgatgggaggggctgctgcaaaggtctctgacacgccctggagacatttaccccattgtcttggtgattaacatttgactcttcattacttatgcaaacttcttcagctggctcgaatttctcctcagaaaatgatttttttggctgggcgtggcggctcatgcctgtaatcccagcactttgggaggctgaggcaggtggatcacttgagttcaggagttcgagacgagcctgggcaaaaccccatctctacaaaaaatacaaaaattagctgggcacggtggctcacgcctgtaatcccaacactttgggaggccacggcaggcagatcacttgaggtcagtagttcaagaccagcctggtcagccaacatgatgaaaccctgtctctactaaaaatacaaaattagctggacgtggtggcatgtgcctgtaattccagttacttgggaggctgaggcaggagaattgcttgaacctgggaggcagaggttgcagtgagccaagatcatgccactgcactacagcctgggtgacagagctagactccatctcaaaaacaaacaaacaaaaaagaaatgggtttttattttctatcacatcgtcaggctgcaagttttctgaacttttatgctttgtttcagttttaaaactgaatgcttttaacagcacctacatcacctcttgaatgctttgctgcttagaaatttcttctgccagataccctaaatcatctccctcaagttcaatgttccacaaatctctaggtcaggggcaaaatgccaccagtctttgtggtaaaacatagcaagagtcacctttactccagttcccaacaagttcctcatctccatttgagaccacctcagcctgtatttcattgtccatatcattatcaggattttggtcaaagccattcaacaagtctctaggaagttccatactttcccacactttcctgtcttctgagccctccaaactgttccagttgctacctgttacccagttccaaagttgcttccacatttttgggttactttacagcagcatctcactcccattaccaatgtactgtattagtcccttttcatgctactgataaaaacatacccaagactgggtaatttataaagaaaaagaagagatttaatggactcacagttccacatggctggggaggcctcacaatcacaattgaaggcaaaagccatgtcttacatggtggcagacaagaacagaatgagagactaagtgaaaggggtttccccttataaaaccatcagatctcatgagacttattcactaccatgaaaacagtataggggaaaccacccctgtgattcagttatctcccaccaggtccctcctgcaacacatgggaattataggagctacaattcaagatgagatttggctggggacacagccaaaccatatcagtttataatcccagcactttgggaggccaagacaggattatcacttgaggccagaagttggagacttacttgggcaacatagggagacttcctctctaaaagcaaacaaaaaaccaagttatccaggcatggtggcatgttcctgtagtcctagctgttccagaggctgagttggaaagatcacttgagcccaggagttcaaggctgcagtgaaccgtgattgtgccactgtactccagcctaggcaacagagcgaggccctctttctctctctctctttttttaaacaaggaagaaaaaagaaaagaaaatagggtggtgaggaggctggccaaagtggtgataacctcgtgcactaggtcctagcagctggtagcaggggagccaggaggtgtagcactctgcctggtaaagcagtctgtcagggtctgtttgcctgagagttgacaggctgcaagcacaaaaatataaaagggggccagggacttgctaatcttgccggagagtcggcgcagctcagtgcaaggacttgggaaggcagggaactttgagagaaggtaaaaaggaggtggattcatggagagggaaggggaaagttgagggttggggaggtgtggtgaggagctgagatcttggagagacattcttcgttggcctagggacaccacataaacacctctgtgcatggtgggagggaccagctcctccccaaacactgtttagattttggccttgaaaaccatgactactaacgttccttgggttttctgtgagtgtgaccagtctcctcagctcccagctggcacataaaggagatgtgttcttttcttgccgatgtgaggctacaggatctcatgaggaacatcccatgaacaaacagtacggctgagccctcacctgcgtctcatcctaatcttggtcctcccccagcacactcccagctctatcgcctggagttacagacaaacccgcagaccaatgtgaaaagccaattgcccagagaaacccagcagagtcttcagctacgcctgacagtcatccggggttaaacaccagcctggaattttagcttcctgtccaggaaaaaccaaatacataaatcacttctctctctctctcttttttttaatggagtcttgctctgtcacccaggctagagtgcagtggtgtgagctcagcttactgcaacctctgcctcccaggttcaagcgattctcctgcctcagcttcctgagtagctgggattacaggcgcgcaccaccatgcctggctaatttttgcatttttagtagagacagggtttcaccacgttggtcaggctggtctggaactactggcctcgtgatccacctgccttggcctcccaaagtgctgggattacaggtgtgaaccaccacgcccggcctaataattcatcttactactagaatttcaggcttcctttttaatttgcttgctttcttgttggtctgtgtcttggaacataggaactttcaatccctccaatatgggctccatccaaatctcaagttgaactgtaattcccagtgttggagtgttggaggagaggcctggtgggaggtgattggatcattggggcagatttcccccttgctgttctcgtgatagtgagtgagttcccacgagatctggttgtttgaaagtgtgtagtagagccgggcgtggtggctcacgcctgtaatcccagcatgttgggaggctgaggtaggcggatcacctgaggtcgggagttcgagaccagcctgaccaatatggagaaaccccgtctctactaaatacaaatttagccggcatggtggcacatgcctataatcccagctacttgggaggctgaggcaggagaatcacttgaacctgagagatggaggttgctgtgagccgagatcacgccattgcactccagcctgggcaacaagagcaaaactctgactcaaaaaacaaacaaacaaacaaaacaaaacaaaaaaacaaagtgtgtagtacctcccccttcactttccctctctcccactccaccgtgtgaagaaggtgtttgcttccccttgcccttctgcccagattgtaagtttcctgaggcctccccaagcatgattcttgtacagcctgtggaactgtgagccaattaaacttcctttcttcataaattacccagtctcaggtagttctttatagcagtgctaatacaccctgttacaggactaatacaccttccctctgctaagtgtctattgatctgaaaacacatgctatgaaacattaaaacgctacctgagaccatgtgtttcttttatcaagtgagagattcctttataatttggataatttcactccgtttgcaagtaggatgctctagaactgatgttataaagtcagtttaatgatttaaatcccattgtggagaaaatagatctccgcagaaaagtacatccctgccctttcccagctccccagtcaagggggggcttcctgctgagcctggagaatgcctctaagaaggtgactaatgtaccatatctggcccctagtgtgggcagcaggcaagtagtcaggtgccttctcaagtggagaaagttgaacgctattttccagagacattggatgtgagggtgatctggctatgacatctgtcacctcagtgattgccactgttgattctgctgatctagctggctaggtggtgtccccttcctccctcaccactccatgtgcatccctcctgaagctgtgtgctcagttgaagaggaggaccatccccaatagaggaggaccagtcttcggctaagggtatacgagtagctgcgctcccctgctagaatctccaaacaagctctcaaggtccagagacaagatgtgaacttcatgtctcaattgatgatcacgtggttgtgtggtggtgcagattgtgtttttgatgtgcagcaggattcgggcagtacagaggatgatgtcagcatatcaccatcatcctcaggtggggcagatcattatgaagtccttgcctctggtttccctggagtctaggtgagaggtgcatgagatatcccttgggtacctccctcctcccctcaaggtgaatgtttcatcaacaaaatcaagctaatagaagtctcaggttgtcacttttggtgtcttgaataggatatttgtgtgagagcccctttgattaacccattgccagccccctcccaccctgacctctgaaccttcacaatatccatcccttaccctccccgctgaccaagtggctctggatcccagtcaggcgctaaaaatctgctatttgtgcttaggttagctttacccatagctgaatggctctgaggttcacggtggaagatctctaagggggacagttttgctgctcctgggatggaataggcatgatggtgatccatccacctgcaagttctggtttcccagtacgtatatgatttagaattagaagcacataatacatagccttgttactggcaccccttcccctaatcttgctttccctttgtattaggccattcttgcactgctataaagaaatacttgagactgggtaatttgtaagaaaagaggtttaattggctcacggttctgtaggctgtacaggaagcatagcagcatctctttctggggaggccccaggaagctttcaatcatggtggaaggtgaagggggagcagggatctcacatagcgggagcaggagtgagagagagtgatggtaaaggtgctacacctttttaaatgaccatatatcacaggaactcactcactatggtgagtacagtgctaaaggggatggtactagaccatttatgagaaatctgcccccacgatccaatcacctcccacaagaacccacctccaacattggggattacatttcaatataagatttgggcagggacacggattcaaactgtatcacccttcatatcatcctttataatactatgccaatctgatcatggccaggttcaacttcttttttaaaggcttcccagagactactgaatcttatgacccaaatctctttgcatggcagacaacttgctgaagaaagcctgtctggctgggttcagtggctcacacctgtaatcacagcactttgggaggcctattcagtttgcgcctaggagttcaagaccagccagggcaacaaagagagaccactgtttaaaaaaaaaaaaaaattagccaggcattggggtacatgcctatagtcccagctactgaggaggctgaggtgaggggatcacttgagcccaggaggttgaggctgcagtgagctgagatcacatcactgtactccagccttagtgtcagagtgataccctgtcttggaaaaaaaaataaaaaagaaagaaagcctgtctgatttcacgaaaggtttttgcaggacacgcttttagtttccacaaaacagccaccctctacttccttactggcaaagctttcatgaatattatttatttgccatttcagtgctgctttctcagatataggcataccttggagatattgcgggttgcgggcccagttccagttcatcacaataaagggaatatctcggtaaagtaagtcactaagtttttgttttcctagtgcacataaaagttatgcttacactatattatggtctattacgtgtgcaatagcattatgtcttaaagaagtacataccttaattttaaaatactttattgctaaaaaatgataatgattatctgagccttcggagagttataatccttttgtgggtggaaggtgtgttgctgtctgatcagagtgggggctgctgaagcttaagtggctatgacaatttcttaaattaagacaacaacgaagtttgccacatcgattcactcttccttttgtgagagatttctctgtagcatgtgatgctgtttgatacatgttacccacagtaaaacttcttttgaaattggagtcaattctctcagaccctgctgcttctttattaactaagtttatgtaatattctaagtcctttgttgtcatttcaacaatgttcatagcatcttcaacaggagtagattccgtctcaagaaaccactttctttgctcatccacaagaagcacttcctcatctattcaaattttatcatgagattgcagcaattcagtcacatcttcaggctccacttctagttctctggctttttctaccacatctgcagttaccgaagtcaggaacccctcaaaagtcattcatgaaggtttgcaccaaacttcttccaaacttttgtaaatgttgatattttgacctcctcccgtgaatcaaaagtgttctttttttttctttctctctctttttttttttttttttgagacagagtcttactcttgttgcccaggctggagtgcagtggtgcgatctcagctcactgcaacctctgcctcccagattcaagcaattctcctgcctcagcctcccaagtagctgggattacaggcctctgccaccaggcctagctaatttttgtatttttagtagaaatggggtttcaccatgttggccaggctggtttcaaactcctgacctcaggtgatccacctgcctcggcctcccaaagtgctaggattataggagtgtgtcaccatgcctggctaattttatatttttagtagagatggggtttcaccatgttggccaggctggtctggaactcctaacctcaggtgatccacccacatcggcctcccaaagtgctgggattacaggtgtgagctaccgtgctcagctcacaagtgttcttaatggcatctagaatgatgaatgctttccaaaagattttcaatgtattttgcccagatatgtcagaaaaatcactatccattgcagctataaccttacaaaatttattcttaaataataagacttgaaagttgaaatcactccttgatccataggctgcagaatggacactgtgttaccaagcatgaaaacaacatttatctccttgtatctctgcatcagagctcttgggtggccaactacattgtcaatgagcagtaatattttgaaagaaatcttttttttcctgagcagtaggtctctcaacagtgggcttaaaatattcaacaaaccatgctgtaaacagatatgctgtcatccaagctttgttgttccatttataaaacacaggcagagtagatttagcataattcttaagagccagagggttttcagagtggtaaatgaggattagcttcaacttaaagccatcagctatattagcctctaacaagagagtcagactgtcctttgaagctttgaagccaggcaggcattgacttttcctctgtagctatgaatgtcctagatggcctcttcttccaatataaagctattttatctacatggaaaatctgttgtttagtgtagtcaccttcaccaattatcttggctagatcttctggataacttgatgcagcttcttcatcatcacttgctgcttcacctcgcacttttatgttatggagctggccttctttggtttgggtggcaaggagagaaggttggggtttgtttttgacatacaaatcactttttaaaacttcaacaataacaaattaatactgtgtttgtgtgtgtatgtatgtgtgtgtgtatgtgtttaagagagatagaaaataaatgtttcttattgtttgaagccacttacttttggggcaatttattatgcagcaatagataacaaacacaatggattttcaccaaattttaaggtttgttttttttaattaaaaaatgacttaaaatatatgctatgtggcatacagcgtatctaatttagtggttctgtggtatcacctcaaagaaattagcagttttacaccagagcaaattaaagtgatgtataatgtgaggcttggaaagatagtctatgccttttaagatattgtgaatatagaaaacaaacagaaattgcaagtaggaaccttatataggaagttataactgtgagcacttcaaattacaataactaatttgccatccggctgcttcttacatgggcaactccatagaaccattttaaggctcattacaaacatacttatttatgtcagttggtaaccgggaacaacatagggttcagctagtctttgacacaaaaatatcattaatttgttgtgggaagtcagggaccctgaatggagggaccagctggagccaaggcagaagaacataaattgtgaagatttcatggacatttagcagttccccaaattaatacttttataatttcttacacctgtctttactgcaatctctgaacataaattgtgaagatttcatggatatttatcacttccctaatactcttataatttcttatgcctgtctttaatctcttaatcctattatcttcataaactgagaatgtacgtcacctcaggaccactattgtacaaattggttgtagaacatgtgtgtttgaacaatatgaaatctgattgtaaaacatgtgggtttgaacaatatgaaatcagtgcactctgaaaaagaacaaagtaacagcaattttgaggtaacaagaaaagataaccataaagtctgactgcttgcagggttgggcagaatagagccatatttttcttcttgcagaaagcctataaacagatgtgcgaggagaaatatcgctgaattcttttcccaggaaggaataaccctggggaaggaatgcattcctcgggggaggtctatagatggctgctctgggagtgtctgtcttatgtggttgagataaggactgaaatatgccctggtctcctgcagtaccctcaggcttactaggattgggaaattccagcctggtaaattctagtcagaccggttctttggtctcgaaccctgtttcctgttaagatgtttatcaaaacaatacgtgcacagcgggacatagaccctcatcagtaattctaattttgccttcgctttgtgatctttattgcccttcgaagcatgtgatccttgtggcttactccctgttcgtacacccctccccttttaaaatccctaataaaaacctgctggttttgcagctcggggttgtcatcacggtcctaccagtatgtgatctcaccgctggaggcccagttgtaaaatttctctctttgtactgtttctctttatttctcagaccagccgacactaagggaaaatagaaaagaacctacattgaaatactgggggctggctccctctataatttgtcttcatacttcatggggttttatgaaggtcaaagtaaataatgtgaggttttggcaacacaaaagaactatacagatgtatcactgtgattatatatcaatcaagaaaggtcagccaggcgtggtggctcacgcctgtaatcacagcgctttgggaggctgaggcaggcagatcacgaggtcaggagatcgagaccatcctggctaacacgatgaaaccctgtctctactaaaaatacaaaaaattagctggatgtggtggcacgtgcctgtaatctcagctacttagcaggctgaggcaggagaattgcttgaacctgggaggcggaggttgcagtgagccgagatcatgccactgcactccagcctggcaacagagcgagactctgtcacaaaaaaaaaaaaaaaaaaagtcaagttttgccatggttaaaaaaatctttacttttttttttgagacagagtctcactctgtctctcagactggagtgcagtggcatgatcttggctcactgcaacttctgcctcctgggttcaagcaactctcctgcctcagcctcctgagtagctgggatcacaggcacctgccaccacccccagctaatttttgtatttttagtagagatgggttttcactatattggccaggctagtcttgaacccctgacctcaagtgatctacctgcctcagacttccagagtactgggattacaggcttcagccaccatgcctggccaaaaatcttaagatgtttacaacatccaagatttatttttgctcatgctatatgtattcattgcaggttggctatggccctgtccatgtcatctcacaccaggacccagatggcagagctggagcagtgacaggtgtcatgagaggagaaagagtcatggagaaccacacactggcctttgaagctatttcctggaagtgatatatgttgcttctgctcacatttgattggccacagaaggtcacatagccaaacctgatgccaaggagtgaaataaggtaatcttcccatatttttgcattttctattgttctttctttcttcctgatgctccaagatttcttctttatcctctcctgtttgtctcaagagttccttttaggctaggtgtggtggcttacacctgcagtcccagcactttgggaggctgagacaggaagatcacctgaggccaggagtttgagagtagcctgggcagcatggtgagatcctgcttctacacgcacacatgcacacacacacacacatacagaaaagaaagaaagaaagagaaagaaagaaagaaagaaagcaagaaagaaagaaagaaagaatttcttttagccattcttttagggtaggtctgctgatgacaaattcttttcattttccttctcctaagaatgtcttgatttccccttcattcatgaagggtatttttgatggctacaggatactgggctgacagttattttcctttggcacttgaaaaaaatgtcatttccttttggttttcatggtttctgaaaagcaatcttctgtcatttggattgtttttcctctacaaatactgtgtcatttctgattggtttcaagattttttagtttccagaagtttaattatgatgtgcctctgcatggatttctttgggtttattctgtttgggatttgcttagcatcttgaatctgttatgttttttccccctaaatttaggaaaatttttagccattattcctttcaattctttttcagctccatcctgtttctcctttccttctgggaccccaataacatgaatgctagatcttttgttacagtcacatagttatgttcattgtggtctgaggttacgttcatttttttcctatctattttctccctgttgttcagattggatgaattctgttgttctatcttcaagtttactgagtcttttctctgtcctctccattctgctgttgtgcccatttggtgaattttaaatttttattatggcatttttcagttctaaaatttccatttgattcttctttatatcttctatttcttttctgagacttctcccttttttatttgtttcaatcatatttacaatgacttgttgaaacattttttatgacggctgcttccttgtcagataattgcaacatctgtgttatcgtgatattgacatctgttgtcttttcttattctggttgagattttcctggttcttggtatggcaagtgattttcaattgcatcctggacatttggatattatgttatgagactctggatcctatttattaatttattttgagacaaggtatcactctgtcacccagtctggaggagtgtagtagtgcaatcttggctcactgaaatctctgcctcctagctcaggtgatccttccgcctcagccccccaagtggctgggactacaggcatgtgccaccacacctggttaatttttgtattttttgtagagacagggttttaccatgtcgtccaggctgttctcaaactcttgagcccaagtgatccacccaacttggcctcctagagtgttgggactacaggtgtgagccattgcacccagcctctggatcctatttaaatcttctattttatcaagcctccttgataccacactaacagaagggtgtgtgtgtgtgtgtgtgtgtgtgtgtgtgtgtgttagggggtgttgtctggttcctgctgagtgagaggtgaaggcttaggttcctcacttggcttccattggtgggggtaggaaacctcagtcctgctgggtgcagatgagtttttgggctactctctaggcctctgctgatatcattctggctaggagcgggaggggtaccactagccatgtggttgccactgataacctgggggtaaggtggagggacagaggctttatcaccactggatgatggtacaagttccagctttcctcttggcttcctctactcagaaggagtgagaggaacacctcactaccactgagggtgaagaggaaatccaggaccccatgttgcctccactgacactgtggggtatgcttttcaccgttagtgtgaataaatgtctgggcttttgagatatcttttcagatttttttctatgtctgacgacttatggctccaactggatcctccaactgctcctgtggccccacccagaagtgactcagcatgtatgaggaccatttcccacacccctatgattgcaaccaatcagcagcaagcacccattgcctagctactccccttcttcccccaaactatccttggaaaactctagtctcagaattttttctaagaggctgatttgagcataataagactccagtcttctccttcgccagctctacatgtgaaaaactctttctctactgcaattcccctgcctttataaattggctctatctgggcagcaggcaagaagaacccattggacacttacagtcccaacagttttaagttccacttctcccaacagtaagtaatctgctcattaacacacgctttattggctcttctcccttccctgtctcactcttcccagcccttcactcagtgcccctcctaaataaactacttatatccaagtacttgtcccaggatgtgcttttggagaaacctaaaataaaacagtaatttttgtggctattcatacctattaatggacatttaactacttacctttccttttcttatttatttatttctgtatttatttactcatttttgagacacagtctcactctgtggtccagcctggagtacagtggtatggctcactgcaacctccatctctcaggctcaaatgatcctctcacctcagatgcctgagtagctgcgatcacagatgtgcaccactacacctggctaattttcgtatttttttgcagagacggggcttcaccatgttgctcaggctgttctcaaactcctggcctcaagtgatttgcctaccttggcctcccaaaatgctaggattgtcagaggcgtgtgaaccacagcaatcccatcttaaataagagctgggtaaaataaggctgaaacctactgggctgcattcccacatggttaaggtattctaagtcacaggatgagacagcaggccagcacaaaatataggtcataaagacattgctgataaagcagttttcaataaaggagccagccaaaacccaccaaaaccaaaatggcgatgagagtgacctctggtcatcctcactgctacactcccaccagcgccatgacagtttacaaatgccatggcaatgtcagcaagttaccctatatggtctaaaaaggggggctgggtgccctggctcacgtctgtaatcccagcactttgggaggccgaggtaggcaaatcacttgaggccaggagttcgagaccagcctggccaacatggtgaaaccttgtctctactaaaaaaaatacaaaaattagccaggcctggtggtgcacgcctgtaattccagctactcagggggctgaggcagaagaatcacttgaacctgggaggtggaggtggcagtaagctgagatctcaccactgcactccagcctgggcagcaagagtgaaactccatctcaaaaataaataaataaataaaataaaaaataaaaaggggaggcatgaataatccagcccttgtttagcatatcatcaagaaataaccacaaaaacgggcaaccagccgccctcagggctgctctatggagcagccgttcttgtaatcctttactttcttaataaacttgcttttactttgcactgaggactcacccagaattctttcttgtgcgaaatccaacaaccctctcttggggtctggattgagacccctttcctgtaacaggattacagccgtgcgccacctcacctggcctttttttttttttttgagatggagtcttgctctgtcgcccaggctggagtgcagtggtgcggtcttggctcactgcaagctccgcctccccggttcacgccatcctgccgctttagcctcctgagtagctgggactacaggggcccgccaccacgcccggctcgtttttttgtatttttagtagagacgaggtttcaccgtgttagccaggatggtctcgatctcctgaccccgtgatccgcccacctcgccctcccagagtgctgggattacaggtgtgagccagggcgcctggcctcacctggccaattcttgattctatcctgtaaactgtccttggagttttccccaggtgactgccctctgacttcttcactttgtgaatcagtccttcacatcttcctctcttagtagcccagaaaccccaggttctaacttccttgtgacacaggagttaagaagaaattacttaggtagacagtgaggttaccgaagttcttggtaaggtttctcttttaatggaaagcaggcccaaatcatttttccttctaacaaagagcagcctgtaaaatcgggctgcagacatagatgacggcagttgtgccaatcgtgttcaaaatggcggccccatcatcccttctctgtcagccacaggtgcagtaaggagccgacaaaatggcaccctccgagagagttcatttgcataataagcttagggtggggcggccagccttcccagctatgtaaacaaacacctgatcaaaccaatctgtgagtcctaagtaaatcagacgccgcctcctcaagctggactataaattcggctcatctgcctccagctgccccttttctctcggaagtcccctctctcactagagagagagctgttttcctttctctttcttttgcctattaaaccttccctcttaaactcctcgcgactcctcgcgtgtgtccgtgtcctacattttcctggcatgggatggcaaaccccgggtatttaccccagacaactggctgcttcacttgcactggatcttgagggtcggggagatttttgacctttaacagggactccatcattgcaagttttccttggagactcttgatggcccaggtttagtttatacctactgtgagagcaagaacttgagtaatgtatggatggacctttttggaaggaaaacaattttcatggacttaaattatttttataatttaaatgtgtggaaacacaactaactatgaattccttatgcttcagtagttaagcagttataaaaccaaagcaaagtagccataggtacaaacaaaagtataaagacaagtttaacattaatgtaataaatagtgtttttctgaaatgaagttgctgctggcaacagaccatgtactgcctgatgaaggttcttccgcacttggcacaatattccactgtgtgcctggcgatgactcaattcttccccttctcatgtctgttcaaattactaagaaatctttgttagaacttgtctcctggccttcacttggtacaaatgcgaccaagacaattaaagctataaataggtaaatgcaaatgcaggtactcacaagcagggccaggatcagttacaaatgacccaaaacatgcttataacacttttcaaatgctactaaggaaagttagacatggaacttaatagttttcacaggtattcacaagtcctcaggagtccagagacctcagtttgagaacactatcctagcactgaccctgacttccagggtgaccttgaggtaagcatttaccatttttggatctctgtacattttttgtacacaagaataatttgggccaccagtgttcttgggagataaaagaagttagaggagttaatgacaatgttccaagatgttcaaggactagagagaaaggataagaatgtattatagacctctagagttggaaaaagaatggtggctgagatcctccagcctagctttggctctgtaatcaaaaagactcagatttgggccaagcattgtggcacacgcctgtaatctcattacactgggaggctgtggcagaaggatcgcttgaggccaggagtttgagactagcctacgtaacatggtgagaccctatctctaccaatctctacatacaaacaaaaaatggctgggcgtggtggctcatgcctgtaatcccagcactttgggaggcggaggcgggcggatcacgaggtcaggagttcaagatcagcctggccaacatggtgaaatcctgtctctactaaaaatacaaaaattagctgggtgtggtggcgggcacgtataatcccagctactctcaaggctgaggcaggagaatcgtttgaacccgggaggcagaggttgcagtgagccgagagcgtgccattgcactccagcctgggcaacagggcgagactctgtctcaaaaaaataaaaataaaaaataacaggacatgatggtgcctgagccccagctatttgggaggctgaggtgggaggatggcttgagaggttgcattgagttataattgtacccctgcactccagcctgggtgacagagagcttgtctctataaaacaaataaacaaacaactgagatctgaattccagatctgccatttactgtgtgtgtatgggggatggggatggagagcaacttttctaactctcagtttctaccctaagtgggcatgtttcaaaatgccacatcacagaactgctgtgtgggccaaatgagatggctctggaaagcgctgagagcagagcctggctcacagcaaggctcagggatcctaagacgctgctgagaattccacaggctttttagcaaaggacaatagaaaagagaaagtgaagattctaacattctgcctataaatgacaacatctcctatatgtgcaaattaggtcattgtaccctaaatagccccgcagctgccctgggcttccagtcagcctttctgacctctctcttgggtctgctgctttgcggtgcttcctgccattccctgcccaagcctgaatctctttcctggccgctttcactttccttccattttccagtaattggagttggtcacctgtgcagcaagcgcccccaagtggccttcctgttcactgtccggaccataaggcctaaagaatactccgataagtttatcaaggccgggcttccgcagaggcaggactcaccaggcttagcggtcggtccagggtcggtccagtctggaggcccagggagccattctacatccccctttccattttggaagactgagatggaggaatccaggggaagttctgggtaggaagcagccacttgccattaagtggcaattaaattgctattgcaatttaaggtaaatcgcagcccctctgggcctagttttcttttttctcactctttttttggcgatagagtcttgctccgtcacccaggctggagtgtagtggtgtgatcatagttactgttacctcgaactctggggctcaagccatcctcctgcctcagcttctgggtagctgggattacaaggttttctttttatgagagccctgccccactcatgtcagagggccctgaggaggcaaacacaggatggttgaaaatgctagtaaaacacctaggatgtgcactgctgtcctggctggaggcttagggggagcaccatgggacgtacacaggataaagtgggattaactcctccctcccctcagccattactctgaactctgcatcccacatgctgctgccaaaaaccacttttaaaagaacacaaatctaaacatgtcatttcccagctcaaaaccccaaggttctttctcctcaccttcagaataagccaaactactcaatgataggttccaaatctgcctttctggtttcactcatgggatggacccttcttccaggtgaggctgcatttggacatagccatattcacgcctccctgccttggctcctccgcttctctggccaggaatggccttgcctcatctctgcaaatcttagcatgacttaaggcccagttcaagctccagctcctccctgaggtcttcctgagtcttgtctcctgtcccactcaggaggacctggcctcctccttccctgggttcccatgaccctttccagctctgcctgtagcacggtgttctgtcttctgtgactacatatatacgcctaacactctctagattgtaaaggcctggaaggtggggagtgggttccattactgaatgcatctttcatagctctctctgtcagagccctgccctatgcaaactcttttatttttatttatttatttatttatttattttgagagggactttcactcttgtatcccaggctggagtgcaatggcgcattctcagctcactgcaacctccacctctcgggttcaagcgattctcctgcctcagcctcccaagtagctgggattacaggtaaccgccaccatgcctggctgatttttttgcatttttagtagagacagggtttcaccacgttggtcgggctggtctcgaactcctgacttcaggtgatctgcctgactcgggcctcccaaagtgctgggatgataggcatgagccactgcacctggtgccctatgcaaactcttattttattattattattttttgagacagagtctccctctgtcacccaggctggagtgcagtggtgtgatcttggctcactgcaacctccacctctcaggtgcaaacaattctcctgcttcagcctcccaagtagctggggttacagacgcgcaccaccacacccagctaatttttttctatttttagtagagatggggtttcaccatgttggctaggctgatctcaaactcctgacctcaggtgatccacccacctcggcctctcaaagcaaactcttaataacaactgttgtggaatgacttgggaggtggcactcagagatcccaagtgacacatgagaagtccacagagagagatcatgtttagtggagtttggatggttgcttttatcagtgggcctgtaccttacagatgctatctcattatcttctaaacagactctgggccagtgaccattatctccctcttactgatgtagactcagccaagagaagccagatgttgagtcggaaccttaactctccctctcagacgcagagccctgctttctcccctcccatttgatactctgcttcctcttgcatgctgtgagaggcggcctcattactcctcttccctcctccagtccctccaagcctaattcatcacctttggctttgggatcatagtttccaaaccaaggattgtctgaacattgtctgacaatgcccttttttttttttttttaggcagggtcttgctctgttgcccaggctggagtgcagtggtgcaatcatggcacactgcagccttgacctcccgggctcaggtgatcctcccacccagcctcctggtgcgcatcaccacatccagctaattttggtattttttgtagagatggggttgtgccatgttgcccaagctggtctcgaacttctgggctcaagcgatcagccctccttggcctcccaaagtgctgggattataggcatgagccaccgcaactggcaccattgccattggtatttaagaggtgatggtttaggctttgaaattggggttgtttgtgaaaactgagagcaccttttgttttcagatatttcctatggccattggtgtaattggagggaagctctcgccatatataatatttttgagacagccaactaagaaactgggattctggttctctccagggtgcaaaatcctgggagaaggaagtgaattctcaggggcccagaaggagtctctaaaggacctctgccagtcaattctaatctctcttctcccctgcaaatcagcccctgcttctgcctctttctccgcctctcctagattctccccctctggagggcctgagctcccggccaccacccccaatgccgctttctgtttcctctgcctcccttcatctccttttgtctggggtttctttgtctggggtctccctttggttctgtttcacagttctcagcctcccctccctttctccacagccaggctgctcagtccctctctgcgggggcctagaggctcggtgaggggagcgggacttggttgccatggtcacattgaagccagccgcagctggcccgggcagctgctcctcctgggcccggggccccggacgctcggacaaagccaggcagcgttggcagccccagacccgaccccaaaggcctgagactggggtgactgggacctaagagaatcctgagctggaggtgagaggggggaagccagagatgaactgggagggcaggagtgggcactggagctgggccctccccttgtgggcagggaccaggcggtccccggctggaggctggaggtgtgttgggaggaggggagcggcccagagcctggcagggaggaggggaaagagagggaatagagttgggtgccatggtgtggtgaatgggctgagggactagggtgtccccaaagggggaccgttgtccagaaacaggttagattctctctttggtcctcatgtccccatctgtcccgcaggtgcctcttcctttctcagccttttatacttctcatctccccgtgtcccttagcttcacactctgcgccccagtctccctcctctttccctccactctctgtttcactccagccccttcttcccttgtccttgcttcttgtccccttgatctgtctgcccagctctcaagcctcctcagttccctgccttcctctcttaggagtttgtttccaacactgtttccttcccgagtccacttcagttccttcatccagttcagcccttttcttcccaaacttcagtctcctcctctgagcccctggggcttcccaccttttgctgtgtgtgccctgtcttcatcctccttttcctctctcagacctgtctccttggccttgacctcagtccatctccgtctctctgggaattctctcaccattgtccccatctgaccatcagcctcctctccctcttctggtcccttgcccttttcttccccaaccacagctgagctgtttcatctctctcccagagctacgtcatctcaatctcctccttcgctccctggcctcagtttccagtttattcagtggcatcaggtctgactcacacccaaagccttgtacactccttcaccctgccccccacccgtcgcttcttactctccccagctgctgacccagcctgctcctccagaggcagctgcagctcccggaaggggactgcagctagtgtatgtgtgggggcccatctggtccgtcctctcgctcgctggtcgtgctgggcttccctcctgtggccaggtggtctgcaggcctgaagctgccttctcccctctcctacgtgcctctcctcacattttttcagctgtttcccatcctctccttcctgggcagcaggctgccactggcttgaaggggagggaagcccaggatgggaggagatggtagagggtcatttgggggttctcagggacacagggggcctctggggttcggagtgatgcaggagatgtggaatgggctctggggaccacggatgggtaatcaggccctcttggtctttggtgctgctctctgggccccaggatggctgggatttccctctcaggcccctgggaatctcggctccgagtcccgcattccagctggctccagctccctttccgttgtcacttgactccactgggccccagccttgcatccctcccactcctccagcctggagctggggcgaggtgggcatcaccactaggaatttctcctgaggcagtgagaagaggggacaaaggtttcaggactctctagctccttctgctctccccagtggacccctctgtctggcactgccatgccacttagctggggtcagcgtgggcctggggtgtggaatgtcccaccagggtatgacaggctgtagcttgcctggcaggcctgttggggctttcccagagcacagctcctggaaggaggggctgtgggctgccaggtgaggtgacttgggaagccttggccccacccccaggctggccccacccccagtccagcgtctcctgggcctagattccccagctgctgttctctggaggggtaggtgttctgggggaatgaatccctgggggcttggtgggacaggaaggcgggaagaagctgctcttcgagtgaccctggggctgtctgttagcaggtccctcagccgttggaacgtccttgggcttctgaactagtgcccatgtgtgcctcggcctttcccaagggccagcttcttcctggtagtgcttttgtgtacttgtctggttgggacttcgtgtttctttcttgggattgttgtctgggactgcaagcagggtatgtttttatctactgtgaggttcctggggcggagatgtgcagtggagcgagaacttcctgtgaccgtgacattgtctaggtggtgagcaggtgtgggggtgtggagagaggtgaggggctgaggtagtgctgagtggggaaaaagcacctcccaccacaagctgttctgtcccgctccatcctctgcccagtagctctctcagttgctttgcctactcagtctcactgtttcatcttccctgggtctcttggtccccttccttttgactgtgtgtgattttcagtgtgcctccatccttctcctgctcctcttcttcctcctcccgaccactcaactttgtcctggcctcatttttggcctcttctggccagtgatcagaccctctggcccactacggccagagctggctgggcctgagggaggcttgccctgaggactcctgagtccccctcccactccactccgttgggagcccaggggaatcagggcctgggcgtctggacccccgggtcccttagaacgcccttcagagagaggaactgagaggagaaggagaagagagtgggcccgccttcagggtctggggccttccaggttgggtcgtaggggcgggagcgcacaggctgcgagagaggagcaaaggttggtggagggagaagagcagtctggggcctggctggacaggtgagccctgagacctgagctctgctcccttctctgggctaactcccgcagctgggctgggccgagcctgtgggaacctgcttcttcctctgtgccctggggctgctcccctttgcctctcccaccaggaaccgatcccagaagtaggaggggcgtcttcccctcgtgggccctgagcgggactgcagccagccccctggggcgccagctttggaggttctcgtttggggaagcgggggtgggctgcgagtgggtggagggggctgggcgcggagccggccggaggcagcggcgcgggcggctgggcggcctgggagcgcccaggcgggcttggcgggcgggttacctgggggaggccgggccgggcgctagcgcgcggggtgggcgtggcgggcgcggggcctggagctcggcgccgggcgtgggagccactgggactactgggtccgggagggggaagggagggctgcgagcccgaacgcgcggcgagaaggccgaggggagggaggggagcgaggagcgggaggaggaagggagggagccgaggcgagggggaggcggcgcctgggcccgagccgccccagccctggctcctctccccggaacaggcccccgacagctgctctcgggagccgcctcccgacacccgagccccgccggcgcctcccgctcccggctcccggctcctggctccctccgcctcccccgcccctcgccccgccgccgaagaggccccgctcccgggtcggacgcctgggtctgccgggaagagcgatgagaggtagggagagcggcggcggaacccgcgggcggaggcctggggctcttggggtgggggcgcgcggcggcgcctgcagggcgaggggcgggggaggcaggacgtcccgagccatgcttggtcgtccagctcttctaagcctccctgcccgcctccccgatgctctggcataccgtctgaaaaccgggggcggggactgggtggaggtgaagcccgtgacctcccagaaagagttttgagcctccagccttgaggcaagtcccctctcactcagtgcggaggaactgagccccgggaggaggtgctcctgtgcagccccactgagtcagctcatctatcgcctgccctccacctggccagtccctgcgggcatctaactgctaagcctccgctcagccaacacccagttggtcagtctggtcacagtccagcaaaaagagggactgccactctaacccaccagtgacaccactcttcccggctggatggtcaattagctctggcatgagagaatgtcactgccggtgagcgccagcttcagggtcccacccccccatgcctggctcttggctgaacatttcttcccagcgcttccagcagccagaggcaggcgcccaagctcgctggctgttgctgagggcctgtaggtgtgtccaggactgagtggtgtggtggagacaggtgaaaggggagtgagtggaaaggcagggaaaggctgttgtccttattgccactcttcccacccagcgcccacctgttccctgccccctcgacgtccctctggcttggtcacccatgtgtgttagaggctgggccccagttctctggggatcctgtgcccaagggcccgggtgtgtgtgtctcatgctgtcttttggtcacaggagcatgtggtgtctgtcatttcatgttcacaggtgtctgaaggtggctattcactgagcgatggggttggacttgaaggaatgccaaggtgtggacgggttgatgtatgcatgagcttctgtgtttgctctgtctcagaaactctgtgagggttgtcagggacactgagaggtgggtgtgtgcatgccacatttagcctcgctgtttacagccagttcagtaagtttgtgtgtttcaccgtgtgtgtgtgtacagagctgtgtgggtgttgtctgagtgggacttgggggttgggagaggagcgtgaagggcttgaggcagggtggcctggcccctggtttgtctttggttgtaatggagtggaagggggtgggattggggaaggtcttctgggcttgtcctctcttgccctctgggtctctgactatggactgaagacccagtggagagagatgaggtgactgggggtgttggagaacagacagcccagacgtctctgtgcttctccgtgttcctctgcttggctctgtgccccgtgtttctgagcctgctctatttacctcttgcattgtggctctcgctctgtctccgcctgcctcgtatcctctgcctgcctttgtatctctgccccgggctcctctcggctctgtgtggctctgatgactcatctgggataggcatgaaggttacttaggggaacaagagccccgctgttcccgagagaggtggggttggagagcggcacccaggaattccaagccagtctcctgggactctggcagcctgctccccggcgctggaccctaagggaccaggcgtgatgccttctggttctagcctctgagtgccccccacaactcagtcgtccccctcagctgctgcttcagagctctggggtctcagctgcctcttacattcctgccctagtgcattgtgggagcagctggaggaggacaaagggatgggggagtatcccccactcctcctacctcctggggtgacctgccttccttgtctttagacccgccctcgtctccaaggcaactcagcctttcctcagtccctcagaggcagccaccttctggaagtgggaactggggggactggatgtctgggtctcaggaaggcagagcagggataactgggcccaagatgccctgaacctgataagaggtggcagtcgagtccctcaggactccagggcctggagacttcagtacagggctctgagaccagtacaggttaggatagcttttcctgcagcaggggaggggagagtagttacttgggtttgtaaggagatgccatttagaatagttttatgtggggtaagcttcctgggcctgaggaacagagtagggattttcaaactttaatgggcacaggtcacctgggaattgtgttaaaaggcagattttgattgagcaggtcaagggtgagcctgagattctgatttcttccatgcttccaggtattgctgatggtccagggaccaccctgggcctagagggctataggggacagtaagactagaaggtgctggggtcccctctgcccttctcttagaattctggactcctatgtgggagggcagcagggtgagctggtccaggcttatctgatgtttaattctatcatatcctcaacaaggaattgcccaacctttcctgggacatatttattttttaaaagtcaaaatgattttcatattcttttacatatcttatgattttacataaatgcatttatgttacaagatttagaaaaatagtacaatcaacctgtctttttaaatttgcttttcttttgccccgttcatgttaactcttgttatattgtattctattgttatattctattatatattctctccttctagacgtacacacaggtatatatacaaacatgggtgcttgtttattctattttcaaaaggtgggatattttttatacttctgttgcttgcttttcatattcaacagatatacatggaaatcacacaaagttaggaatatattgcctctttgttacttttcatagctgcatagtagtcaataaaccttattttttttaattccagcctgtcccctgtgggcattcacatatcttacagatttatgtcttacaaaaggtaccataataaacatctttgaaatcttcttttttatttttatttttcactttttttaaagagatggggtctcactatgttcaccaggctggtctctaactcctggcctcaagtgatcctcccatctcggcctcccaaagtgctggggttacaggcatgagccaccagacccagacctgcacatatgttcttacttcctggtgcttctctctcgagggaatgctgggtcgaagaggatgtgcatttttaattataatagacattgctagattgctttccaaatagaagataacactcatttctgccattgagcatggtgcctcccttttcatcactttctaccacttttatatgttacagccttaaaaaaatatcttgtcagtctgcttggtatttccctgaggctggtgaatttgaccattaaaaaaaatgtttgttggcaatttggctttgcttttctgtgaaatgactattcacattctttggctgtttctttattgggttacttatatattttttcttgtcagttcctaaggggccttagtttattgtagttattaaaccttttcctgttgtatgtgttataaacattttttgcacacttgttgtttgttctaagccgttgtttatggggatattttgcccattcctgattggagaaatggggctttaggaagttatttaactgatctctgccctagtttcttcatgtgttaaatatggatagtaatagtatctaccttatgaagtgactgtgaagataaaattatggattctgtttaagggtttaggccagtgtctggcacaggggaagcattctaaaaatatagctgatgctgttaaacaatgactgttgttgttgttttactgttattatccccaaagcggcccattctgtctgttgctgtcagctatgactcagtcccctgattaacttacgcaccacccattttatcccctgcagagatgctgcccccacccccttaggcccgagggatcaggagctatgggaccagaggccctgtcatctttactgctgctgctcttggtggcaagtggagatgctgacatgaagggacattttgatcctggtgaggagactgaatcatgggtccctgagggccagggcttgggaggtagagagttgggggccttgacctgttacatgcctgctttttactcagccaagtgccgctatgccctgggcatgcaggaccggaccatcccagacagtgacatctctgcttccagctcctggtcagattccactgccgcccgccacagcaggtacttggcacacctggcacacttgtagctgccccgagaggagctcctgggacctctacttcccctccaacccctctgcccatgccagtgaaacccctgcaggctgagggggcaaatgaagtggggtttaaatactggagatggaggcagacctggggccagatgttctctgtgcccctcttcaccctcaggttggagagcagtgacggggatggggcctggtgccccgcagggtcggtgtttcccaaggaggaggagtacttgcaggtggatctacaacgactgcacctggtggctctggtgggcacccagggacggcatgccgggggcctgggcaaggagttctcccggagctaccggctgcgttactcccgggatggtcgccgctggatgggctggaaggaccgctggggtcaggaggtgagactggcaggggcagcacccagaggaggttggctctcctcacttccagctgtactttaaacaccacctatacgctgacgactctccagtttatatcatctccagactaagcctctcagctgagctccaaacaatattgtaaacctggccaccttttggatttctccacttagatgtctttttttttttttctaatagatggggtcttgctgtgttgcccaggctggtcttgaactcctgggctcagtgatcctcccaccttagcctcccaaagtgctgggattacaagcactgtagccagccacctagatgtctaataggcatctcaaacgtacgtttaacttcccaagctgaatttgattcccattcccagcctaaacctgctcctcccctggcattctccagctcaggaagtggtatcaccattgcctggttgcctaggctataagttaagatgatatccttgattcctttttttctctcacctccttccaaagcatcagcagccccgtctgttctacctccatagtgttcctgagtccagtcactcctcaccactccacctctactgccctaggccacctgcccgccatctccagcttagatgagtgcagtagatgccaaacgcgtctccctgcttctgcccttttctgcctggagtcaaatctccacctgggggggcggcatccagtggaccttagagcatgtaaatcagatacgtcacacctagctgacacccccatgctggctttccactctgccagaacaaaagctgagtccctagctggtgcaggatgctcagcctgacctggctcctgcctgcatcacttgtttcttggcgcctccttggccacgctgcctttcttcttgttgctggaacaagccagggctcgttcccacagcttctggacattttctctgtgcctgcaaagctcctcccctaaataaccacaggctctccctcactccattcagttctctgccaggtgtcacctccttagagagccttttctggccacccacctcactgctctgtccatacttcctgcctcttgttcttcgcagctgttttccctgctgggatctcagtcctacaagggtggggagtgacgttcaccactgagaacgcgcctggcacagagcgggcactcagccaacttctgctgaatgaacagagggaatgggctgaaatgaaggggaagctgaggcaggggtgcagggctgtgaggattggggagaatctgggcacaatgggatgataggcttggagacaaatggatggagccaggcaaggagaagagggcagctgagcctgaagtctgaggatggaacatcagagctgcgacagagccagaggtctcagctgcagatcttcatttcacccatgcctggctgcgccccacagtgctgtgtgctcggtgccacccctcatgggtctctaagtggccactgtgggctgggccagggagcagctggtgggtgggaagtaagatctgacctggactccatcccacccaccccctgtttcctggcccacaggtgatctcaggcaatgaggaccctgagggagtggtgctgaaggaccttgggccccccatggttgcccgactggttcgcttctacccccgggctgaccgggtcatgagcgtctgtctgcgggtagagctctatggctgcctctggaggggtgagtggctcagcttcctgggaatctgtttcctgagcaggggactggagggtggggagtgtggagaatgggcatccaggatcccttctcctgctgggaagctgtcactctgaggagggggctagccagcattgtctcctccatgccaatgagccagtggagagatacaagaagggacctgaaacctgcccaggcctgatgcagggatgggggatggagccttagtgcctctgacccccatcctctcaccctgccccagatggactcctgtcttacaccgcccctgtggggcagacaatgtatttatctgaggccgtgtacctcaacgactccacctatgacggacataccgtgggcgggtaagaaaggcccctgcaggatatggagtttggggtgggagggaggactgtgtgtgtgtgtgtgtgtgtgtgtgtgtgtgtgagtgtgtgtgtgtaggggggctggtaagtagggtggggagtgagatggaagagctgagaagagggatgggttaggtggggcctcaaagggtagcactagggtgaccactagcccgtatgacactgtatgaaaaaggcacccctttgctaacacacattgttggaaattgctgcaataaatatacacatcatagattgaaatggtgccccttagaggtggtgcctttgtgctggatgtgacctgcaaggtacctgtagtgctggggtggggtggagagaggagaagggccagctgcatgagtgtgaggtgggatgggaatgggactagtggatgggagccaggctggccatgccactgtgccggagggtggcggagcagaatgcctggatgtcaagaccctcttcccttccaacctcctcttccttggtcccctcttctccagactgcagtatgggggtctgggccagctggcagatggtgtggtggggctggatgactttaggaagagtcaggagctgcgggtctggccaggctatgactatgtgggatggagcaaccacagcttctccagtggctatgtggagatggagtttgagtttgaccggctgagggccttccaggctatgcaggtgagtgagtccggctctcgaggagggctctgaagccatgcagggtgccgttggggtgcccccaccactcctagccttgaccctgtgccctcttcccttccccccaggtccactgtaacaacatgcacacgctgggagcccgtctgcctggcggggtggaatgtcgcttccggcgtggccctgccatggcctgggagggggagcccatgcgccacaacctagggggcaacctgggggaccccagagcccgggctgtctcagtgccccttggcggccgtgtggctcgctttctgcagtgccgcttcctctttgcggggccctggttactcttcagcgaaatctccttcatctctggtaagccctggagtagcccagtctccagtccctgaaattgacaactgatttcattcctaaccctgcagtgtccctaaaatactcattccttgcattatatctacccatcacccaccgaaacttctcaattaggggtgccccaaataacttgagcccctttctgcctcttgttctctgcgtatccatctttcctttgtaagccccttgcccgtgactattattgagccagtatgacagtactggttgttaaaatattgaaatacttctgtattagttgagaaatagcctcttctctaagcctccagatacctgtcctccacctccccacaatccagcaactatagggttaacacccaccacagctgggtgttccaggaccctgctcccccagcccccactggtcagtggttgcctattgagaatcacccatgcttctgctcctttgcacaacagtccactgcctctgcctcccttgggtctcctcctcatttacctccctcctttctttttgttccttctccccagatgtggtgaacaattcctctccggcactgggaggcaccttcccgccagccccctggtggccgcctggcccacctcccaccaacttcagcagcttgggtgagcaatcttgggtgggcgtgtggaccctctgcacccttctccctgggcctcccccttggctagggtgggaccctcctgtggtgctgaccctgctgcctccaccagagctggagcccagaggccagcagcccgtggccaaggccgaggggagcccgaccgccatcctcatcggctgcctggtggccatcatcctgctcctgctgctcatcattgccctcatgctctggcggctgcactggcgcaggctcctcagcaaggtgggcacagccgtggcatgtggagtggcggggggaggccaggccccagcacgagccagcgtccagtgggacctgcagggcacagcccactagcatcccaagaggagggcttagtaaagagaccacttacaccatgtcaaagagggtatggggctcacagggagggctgctccccagctctgggtctgctcagcggagaggagcaaataccacgacccagaggagagagcctgtggagagggcaccttgacaggggcagtagactttggtcctgggatgcagctggcccgtatctacccctcagggagggcctgggagaatagatgccctgacctcactttctgccccaaactcctgctgggctcctctctggctaacccaaaccaggcctgttggtgcagtgtacactggtcagccttggggcagaagcagggtagagacaggcagagagtggggttggaggggcaaagggaagacgtctggcacaccccaagccacgtcttccggctggagtccagtggcagtaatatacattaaggttgatgactggacacggtggctcatgcctgtaatcctagcactttgggaggccgaggcgggaggatcacctgaggtcaagagttcgagaccagcctgaccaacatggtgaaatcccatctctactaagaatacaaaattagccaggcatggtggctgatgcctgtaatcccagctactcaggaggctgaggcatgaatctcttgaacctgggaggcgaaggttgcagtgagctgagatcatgccatttcacttcagcctgggcgacaagagcaaaattccatctcaaaaaaacaaacaaacaaaaaaaaaacggttgatagttatggactgggcagatgagggttagaatctcattgtgggacagggaagttacctccatgctcttgagcttcactttctctgcctgtaagatggtgctgatagtatccacagctgtagggctcttgtgagggctgagggagggaacgcagggatggacacagcagagggccaggccgtgtgtgctgagcaacacgggtgatgcctcccatccctatgacaaggctgaacggagggtgttggaagaggagctgacggttcacctctctgtccctggggacactatcctcatcaacaaccgcccaggtcctagagagccacccccgtaccaggagccccggcctcgtgggaatccgccccactccgctccctgtgtccccaatggctctggtaagacctgccttgttccagtcgcacctctgtcctctctgctgttttcttattgtatccctttcccattctctttttttcctgtcttccccagtttccacttgttttcttctttctgtgcccctggttactgtctatatcactctttgtccctaccatgtagtctctctcaagagttccccatgtattacccatagtcccccgtggtgctatcttgtctgtgtcccacagacatctctctatctttgttgtaccctctcattgtgtctccctggcccctttgctttgtattagactcaccatgtttgttccttcatctatcctccatcacccatccttccatccatagtcatacatccttgcatccatccatcaatcttccatcatctgtctttctatctatattcataaatctattcatccatccatccacccacccatatccatcatccatctatccatctatattcacacatccatctttccatctgttatccatccatccaacaaaacatctgtttaccatccatccatctattcatacgtcccatctgtccatgcattcattatccagccagccgtccgtcactctgcagatccttgttttatcctgtctgtctcttaatgcaatcatcccatcagccctggtcttgccctattcaaggtctccctgtctgtctagccttgagtctcatcccttccccgtgtttcccctcctccttctcccgacagcgttgctgctctccaatccagcctaccgcctccttctggccacttacgcccgtccccctcgaggcccgggcccccccacacccgcctgggccaaacccaccaacacccagggtaagcccctctgcccctgggctccgccaggctccccatacctctactggggcagggaaaagccctcacaccttgcacttcctcctctccccactgtggcctattctgctctcctgagctcccaaggaggaagctcttgtgcccttagctcatctctgctgctgcttgctcttttttaaggtcccccccttgagctgaggagtagaaagcttactggtccccagctcttctccctcctcctcttccacgccatctcttcagctctccagagctagacaggaggttgctgtggtggccccagactatagtaactcctcctttattctccactctctctagagctgcgaggaggagggctctcaccccgggcgcttgccctttccctcacatgtgtcctctctctgcagtcccagaggtgaaggctcatgccccaaccctttccatctgcccctcttctcctcagtgttgccttctcattgtggccccttccccagggctaagaggggacagctctgcttcctctcctgtctgtagacaacttgtgttggggctgtgagcagctgttaccctccctcctctctgtgtgcctctgtctctgcttgttgttgagcttggtgtgttgggttgaaagggttgggagggcttggccccagggggagccaggctgaaagccacgggagagcagctaagtgaaggggagggagctgtggtgaacgggacaagggtttggaaggtggagggtgcctggatgctgggaccatcctgaggcgggagaattcctggggaggaattcttcttccagccaagatttatctcacagtctcttgagagaccctagggaggccctaaaagagtaagactttatgacagttttgctcaaccatattcattgccttgaaaagctctggaatagctaactctcgtcccatgccagtgtcttcctggtttgaggttggcgcatggaatactgggaagatacagcatagacccagtctctcactcaaccgggagacacagggccctccgggaggctgaggtgtggggaactatagctcttgggctgttcctgatgcctcgtcctgtcttctttcccctcacccctgcagcctacagtggggactatatggagcctgagaagccaggcgccccgcttctgcccccacctccccagaacagcgtcccccattatgccgaggctgacattgttaccctgcagggcgtcaccgggggcaacacctatgctgtgcctgcactgcccccaggggcagtcggggatgggccccccagagtggatttccctcgatctcgactccgcttcaaggagaagcttggcgagggccagtttggggaggtaaggagggtgcctacccagtgtctggccctattgtgtgctctgatgccatgcctgtgcatccccctagccaggaaccttagtcatttgtaaccgtgttaatccgtttgaccctgtgaccgcctagcaaacgaacttctttctccaggtgcacctgtgtgaggtcgacagccctcaagatctggttagtcttgatttcccccttaatgtgcgtaagggacaccctttgctggtagctgtcaagatcttacggccagatgccaccaagaatgccaggtgaggaccagggatggcatctggaagaagggaggggaggccgtgaagagtggggagccatctagagagaacaatggcagagcccaacagaggggtggcatctctgggaggggatttacatgtacgctgggggtggggatgcctggtctgcctgaggtggggcaggggggtgggggcgcgggggaaggtgcaggccgcccactcggcattcctcttcagcttctccttgttctccaggaatgatttcctgaaagaggtgaagatcatgtcgaggctcaaggacccaaacatcattcggctgctgggcgtgtgtgtgcaggacgaccccctctgcatgattactgactacatggagaacggcgacctcaaccagttcctcagtgcccaccagctggaggacaaggcagccgagggggcccctggggacgggcaggctgcgcaggggcccaccatcaggtacctgcttacccaggctgggccttgctcagaattcccccaggggatctcctcctctcccctcgcttcagcctggaggaaaagaggggagcgtgggggtgggaagggagagaggttccaggagggcctgggataaggaatgtgtgacaagttaacccaggaacatggacagaaaggctggaggtgactatgcaagagtggtgaagggacttgggccctgccatgacgtcccttctgctttctctcaccctcactcccctctgagtccagattggggagcacaataaaagaagagccccctagtgttggccaggcctgggagattgagagggaagtgacccttggcctcacgtgggcattccacctccacatggggagccagagtgaccgggcccggggagtgggctctctctcctctcctggatgggaatctgcgaagctgcccccagtgaccttctgtcggttcccttctcagctacccaatgctgctgcatgtggcagcccagatcgcctccggcatgcgctatctggccacactcaactttgtacatcgggacctggccacgcggaactgcctagttggggaaaatttcaccatcaaaatcgcagactttggcatgagccggaacctctatgctggggactattaccgtgtgcagggccgggcagtgctgcccatccgctggatggcctgggagtgcatcctcatggtgagcagcccgaggacagccaggttggagcagggcaggtgggagaacactggccgccactcacagccctggtctccatcagtcacacactttctctgggttgcattttacagaatctcatctataatatgaggttctcctagcccaagggactggggaaagcaggagctgcagtgtgatgggcaagaatccaggagccaagagtgggtactggggatggagacagggtggcagagagctcaagagatgaggttgggcgaggaagctggagatagaaggggttgggtagggagaccgaaggtcaggaccagaaagtgggggtggatggagaggaaggaggagcagaaggaagaggtgggccagggccctggagagaggaccagagcatggagaggaaaggcagagcccaagggagaggagttggaaaaggtggccagcggaggagagtggagagcctggcgtcaggagggatcaggcctgagtggagcccagagtggatctggggcttccaataggaagggaggagggtctacgttgcctgatgtccctgtctgtttttgctgccttctctgcatcccaggggaagttcacgactgcgagtgacgtgtgggcctttggtgtgaccctgtgggaggtgctgatgctctgtagggcccagccctttgggcagctcaccgacgagcaggtcatcgagaacgcgggggagttcttccgggaccagggccggcaggtcagagtggaggagagggaagatgggtccgaggcgggggacagaaggggcagagttgtcatcttggagactaaagaatatttgttccctgactctcatccacactgccacaatgcaggtgtacctgtcccggccgcctgcctgcccgcagggcctatatgagctgatgcttcggtgctggagccgggagtctgagcagcgaccacccttttcccagctgcatcggttcctggcagaggatgcactcaacacggtgtgaatcacacatccagctgcccctccctcagggagcgatccaggggaagccagtgacactaaaacaagaggacacaatggcacctctgcccttcccctcccgacagcccatcacctctaatagaggcagtgagactgcaggtgggctgggcccacccagggagctgatgccccttctccccttcctggacacactctcatgtccccttcctgttcttccttcctagaagcccctgtcgcccacccagctggtcctgtggatgggatcctctccaccctcctctagccatcccttggggaagggtggggagaaatataggatagacactggacatggcccattggagcacctgggccccactggacaacactgattcctggagaggtggctgcgcccccagcttctctctccctgtcacacactggaccccactggctgagaatctgggggtgaggaggacaagaaggagaggaaaatgtttccttgtgcctgctcctgtacttgtcctcagcttgggcttcttcctcctccatcacctgaaacactggacctgggggtagccccgccccagccctcagtcacccccacttcccacttgcagtcttgtagctagaacttctctaagcctatacgtttctgtggagtaaatattgggattggggggaaagagggagcaacggcccatagccttggggttggacatctctagtgtagctgccacattgatttttctataatcacttggggtttgtacatttttggggggagagacacagatttttacactaatatatggacctagcttgaggcaattttaatcccctgcactaggcaggtaataataaaggttgagttttccacaactgtgtgagtgggttccttgggaatttggtaactctgcctcctgcacctccctctgaacccacttcccaacccacttcccatcttccttttttcctgcctcctcattccatttcccatcacctgttttgcccagcattgtgttctgtttctggataatccaggcctttgcctgtgggacctcaggagatgcatgaatgtctgagtgcatgaaccttctcaactcagaggggtgctctggtggaggcctggaaggaatgcagtcaggccaggggtgctgaaccttttttgtgccataaacgcctttggcagtctgtagaggtctactgagtcctcctcagaattaggttttaaaacctataaaatggaccaggcatagtggctcacccctgtaatcccagcactttgggaggctgaggtgggtagatcacttgaggccaggagttcgagaccaacctggccaacatagcaaaaccccatctctactaaagatacaaaaattagcagggtgtggtggcatgcgcctgtaatctcagctattcaggaggctgaggcaggagaattgcttagaacccgggaggtgggggttgcagtgagctgagatcacacaactgtgctccagcctgggcaacagagtgagactgtctcaaaaacagaacaacaacaacaacaaaacccataaaatgtataggattataagggaaaccaatggaaacagtttaccaaaatgctaaaaaattatgaaactaatgtgcttctttttcatgtatttaataacaagatctaaaaacaggtgtaataaactgacattttccaaatactaatgagcataagccatatttgagatttctacaacagtcacagtgagacataaaagtagctgtggtgtcaattagtgacaagtcacaggtactgctaatactactggtggttttacccatattcataattggaggaaatgctaaacttctattagaggttagtaaaaggtgtaatttctttttcttgcccaaattctagaacccatctggctccccagggtctggaaatcccaggggagaatccctgggttatgctgatcaagtgtgcaaatgccccactgggggtaggggataggttgttggaatggaaaccagaaccagaaaccagaatcaagagcctcagttatctcagaggcttggaaggatgagctgcaaccaccaagagaacaattaaagggttcaaatttggttggaaagaaaaaatcggccagtggggtggctcatgccctgtaatctcaacactatggaaagctgaggtaggaggatttcttgagcctaggagtttggaaccagcctaggcaacatagcacactctggcccccatttatacatatatatataaaactagctgggcttagtggtgtgcaccagcaactcaggaggccaaggtgggaggataacttgagcccaggaggttgaggctgcagtgagccatgattgcatcacttcactccagcctgggtgacagagcaagaccctgtctcaaaaagaaaattaaaagtcagttgcagggatgggacaaggcagacccatcttgatggccattcatgtgaaataaaaaccctggggttttggttgatgatattcacaaaatgagccaattggataatgaggatcacagtaaagataaatcaatgtgaagttgaattaataggcccttggggcctaggtcccgaatctaatagtcctgctaaaacttacacaggtcaaaccactgtgcactatgatttaagttgtgtaccgataggttagagtttagaggccagatcccagaataatgagcgatggaagccacggcagtgagcctgataacccaaatctctgagctgtctttcaagcagaaacacctggagttaattttttttttttttttttttttgagacctggtctcgctctgtcacccaggctggagtgccgtggcgcaatctcagctcactgcaacctccgcctcctgggttcaagcgattcttctgcctcagcctcccacatagctgggattacaggtgtgcaccaccatgcccagctaatttttttgtatttttagtagagacggggtctcaccatattggccaggctggtctcaaactcctgacctcgtgatccgcccaccttggcctcccaaggtgctgggattacaggcgtgagccaccgtgcccagccccacctgcagttaatttaaaagtcaggccctgcttgtccaaacctgcttctcctccacagtctactgactcagtgaatggcagcatcatccacttagctgcacaagccgcacaaggtggcatccccgagctccttctcccttaccttccacctctcaagtccagtccagcacaaaacgctgttgattttgcctcccaaatctccctggaacttgtcatctctgtctccatcgccctcctggcacatgctgcctccatcttgcctggactcctgcagtggtctcccagctgtcacccagatctgcctctgctcctctctgggttgttttccaccctgcaaccacagttatctttaaaacacacaaatctgaccctaatccttcatttcaaatccagcagtgacttttcattaatcttaaaatgaagaacaaaatccttctggccaaggttggcccccacatacctctccagcgtcctcccccacccgcttgctttcctctgtgggccactggccttctttcagattcacccaatgggccacagtacttcctgccacgtggccttcgtggcatgctgttccctcacctggaacaatgttccctgcagtctgtgccttattaactcctgcttgtccttcagcagtctttcctgacttccccaaccaggtcaaattccctactgataatctcagaggacatgaatctcttctttgtggcacttactacgtgtgtaattttacatatctttttatacctgcccctcccaccaaactataagttgcacaagggcaaaatcttggaacacagggctcaatattggttgaaagaaagaattgtagcaaatatctgatagactaacatagattctatgtagttacagaactagaactaggattaataagtgaaagttacaataatgatgataatatattactgagcacccactatataccaggtattgaaattacgacatattatatcttacttaatacaacaatatatgaagtagttaaaattactttgcacagagaagaaaattctgttaggttaagcagcttgcccaaagtagcagtcagtcaacagtaaagcctgtgggaagtgggtctgtgggctcctggctctctgttcctttttttttttttttttttttttgagacaaagtcttgctctgtcacccaggctggagttcagtggcactatctccgctcactgcaacctccgccttctgggttgaagcgattctcctgcctcagcctcctgagtagctgggattacaggcacctgccaccatgcccggctaatttttgtatttttagtagagactgggtttcaccatgttggccaggctggtcttgaactcctgatgtcttgatccaccctcctcggtctcccaaagtgctgggattacaggtgtgagccaccacgcctggccctggctctctgttctttctctccaggatgctgcctgagaggaggaggtcatgagctccctatcacaggaattttcttttttgaactaccatgcccactaacatgctggccaacacggtgaaaccctgtctgtactaaaaatacaaaaaaaaattagccaggcatggtggttcacgcctgtaatcccaactactcggaaggctgaggcacaagaatcgcttgaatctgggagacagagattgcagtgagccaagattgtgccactgcatttgacctgggtgacactgtaagactctgtcccctcaccccctccaaaagaggtgtgcctatttcaatttttttttttttttttttttttttttttttttttaatttgagacagactctcattttgttgcccagtctggagtgcaatggtgtgatctcagctcactgcaacctccacctccagggctcaaacaaccctcctgcctcagcctctcaagtagctgggcctacaggcatgcaccctcatgcccagctaatttttttattttttgtagagacagggtttcaccatgttgcccaggctggtctcaaacttcggggctcaagtgatctgcctggcttggcctcccttcaaagtgctgagattacaggcgtgagctactggacccggcctcaattttcagcaaaagtgtatgagtatgctcctataccctggtcaacattgaggttgtcaatccttaatttcttttttgctgaacttttatattttaattttatttatgtatttattttgagatagagtcttgctctgttgcccaggctggagtgcagtggtgtgatctcggcttactgcaacctcagcctactgggttcaagtgattctcctgcctcagcctcccaagtagctgggattacaggcgcccgccaccatgtctggctaatttttgtattttcagtagagacggggtttcacccgctcaggctagtctcgaacttctgacctcaagtgatccacccgcctcagcctcccaaagtgttgagattataggtgtgagccactgcctccggccgatttatttatttttatttttatttatttatttattttgagatggagtttcactcttgcccaggctggagtgcaatggtgtggtctcagctcactgcaacctctgcctcccgggttcaagtgattctcctgcctcagcctcccaagtagctgggattacaggcgcccgtcaccatgccagctaatttttgtgtttttagtagagacaaggtttctactaaaatgttgaccaggctagtctggaactcctgacctcaggtgatccacccaccttgacctcccaaagtgctggcattacaggtgtgagccatggcgcctggcctatatatttatttttaagagacagtctaattctgcggccaggctggagtgcagtggtgtaactgtagctcactacagccttgaactgctggactcaaccaatcttcctacctcagcctcctgagtagctaggacttcaggtgtgtgcataccgagctaatttctttttctcttttcttttcttttctttttttttttttttttttttgagacagggtctcactgtatagctcaggctggagtgcagtggcatgatcacagctcagtgtagccttgacctcctgggtccaaacaatcctcctgcctcagcctcctgagtagctgggaccacagaaccaggcctggctaattttttgaatttttttttttttttttgagacaaagtctcgctcttgtcccccaggctggagtgcaatggtacgatctcagctcactacaaactccacctcccgggttcaagcgattctcctgcctcagcctcccgagtagctgggcttataggcgcctgccaccacgcccggctaatttttgtatttttaggagagacgggtttcaccatgttggccaggctggtctcgaactcctgatctcgggtgatccacccacctcggcctcccaaagtgtcgggattacaggcgtgagcaccgtgcccagccaattttttgatttttgaaacatttctgatattctgtttaactttctttttgctttggccaatctttctttctctttccttctttccccctccctaaccctcccttcctctcccctccccaattctcccctctccagttctcccctgtcctctcctctcttcccctctccttttgggacagggtctcacactgttgctcaggctggagtgcagtggtgctatcattgctcactgcagcctcaatctcctgggcccaagtgatccttctacctcagcctcttgagcagctgggaccgcaggagagcacaccactacacctagctaatttttgttttgttttgtttttgtagcgatagagtttctgtataatgcccaggctggtctggaactcctgagctaaaatgatccaccttctttggcctcccaaagtgttgggattacaggcctgagccaccccgccaggcctctttcttttctttttcttttcttcttctttttttttttttaagctgctccttgctgagcagggctaactagtaagcagtggtctgtcccaatctttctattatgtttctttttcttattgctttgtaacagctttttgtattttgtttatttcatcaaccatttcttcctagattgtaaattgtctttcaaccttacctaaagtttgccataaagaagctctgtcaatttttagctgttctttgaagattttaaaacattaattgctaaaaagacagggacaacagaaaacatgggtgggctacaaagtataaaaagtcttgcatagtcattaccattttgatccctggttgcttgcaaatgtgcttcaaatcccagcttgggcacttcctgtctgattgtagggattttttttttaatttttttttttttagagatgggcatctcaggttgggctcagtggctcatgcctgtaatcccaacactttgggaagctgaggcaggtgggtcacctgaggtcaggagtttgagactagcctggccaacatgttgaaaccctatctctactaaaaataccagaattagccgggcgtggtggcacacacctgtagtcccagctacttgggaggctgaggtaagagaatcgcttgaacccgggaggctgaggttgccgtgagctgagatcatgcaactgcactccagcctgggtgacagagtgagagactccgtttcaaaaaaaaaaaaaaaaagagagagagagagaaatgggggtctccctctgtcacccaggctggtgcgatcatagctcactgtagcctcaaactcctagtctcaagcgatcctcctgcctcagcctcccaagtagctgggggtcacagctctgagccacctcgccaggctgcaggcaaatttcttaatcttgccgggctccagtcttccagtctataaggtgggaataacaaaatttgcatataggaatttggggaaacgtgtagttctgggtttgggtgaagacctccacttttgtagtaggttcataaatcaaatcagagcaaatagttggtgtcttaaaaactgtatttatctgggtcttctaagtaaacggtttgaggagtggtggaggcagaaattaagatttactgagtacttagggtcaagtaaggtgcactggatcgtgttaatcgttaactcgtggaaaccgcccagagtgtgtacgctttctttcttttctttccttttctttttttttgagacggagtttcactcttgtcgcccaggctggcgtgtaatggcatggtcctggctcactgcaactccgcctccagggttcaagcgattcacctgcctcagcctccagagtagctgggattacaggtgcccaccaccacgcccggctaatttttgtatttttagtaaagacgggggtttcaccatgttggccaggatggtctcgaactcctgacctcgggtgattcgccgcctcggcctcccaaagtgctaggattacaggcgtgagtcaccgcgcccggcctggagtgtgtattatcccaattttatggggagtaattgtgctcactcggctcaccaccaagtcgccagagcgcgcctccgcaaggaagccctccaggcacttctactttcccggacccgcctcccgctccagccggttacacgcgccgttagcagcgtgggcggagttggttctgccttcgcggaaccaactggtccagcttctggtgtctcccctcgctcaattaaaagccagctcctctcctttcggcttccccacggtgcctttcgggatttgtagtcagacgcgcttcagccggctctgaggagagcaaaggcaagactccaattcccagcatcccccgcgcccggagagtgcagcgtctattctcatcctcttcacttttccactcctccccttacctcccttctcttctgaattctccattctgggctcttgcctgtgaaatctttctttgctttccccatcttttcctcgcattttttcaccatctttccctcaatctccaggagccaatgcgagactttggctccgattaagcgacggcccgagactcggggtgcgcgaggaggatcgacagagtggtgaggggacctaggagggcgggagtggcagaggtatgagagagagagaggtgagtgggaggcgaagagtgagaggaaggcagggagaagctaggagatcggaaggcgtgggtcagggtgaatgacgtgaagtagacttgggaagggaaaagaggtggctttagatttgggaagcatggaggggagaggttaccgccgtacttagcagaagtgggctaagagatagaagataggaaggacgggcagatttggagcttgtagactggtctgaccaggatgggatggaagagagaggtgtgggctcaattttctttgtccctgtttagccaaagatgagacaagtcattgaaatacaaaatgatcttgcaaacactggacagttaacaattctgtcacttggtaattgagggaagactggagttgaagggcagaaatagggtgaggaggcaagaaagggagggagattggtcaggtttgggagaaaccagaggagatgagtgacatgggaaaggagaccacagaaaaggtggggttattgtggggactgatggatctggaatcagttagaaaggtcaggggtgacactggcatggatggtgaggttgcacttctgacgtttgcattcctcaggtgatggagagcaccccttcaaggggactgaaccgagtacacctacaatgcaggaatctgcaggaattcttagggggcctgagccctggggtattggaccgattgtatgggcaccctgccacatgtctggctgtcttcaggtgagaagccccttcatggcagggaaatgtaatggggtctgcggagtggaataaaatatcataggtaaaagtgtagcagcctggagtcggggtggggactgggggcaagggttggaaattgctctaaagtgtggaggccaaaacagcaggactggtaaagttgtgctggagtgagatgagatgtttgagaggtaattgagggcagagatgcagatacaatgcagcttctgatactaacctttgacctctgttcctgtacagggagctcccatccttggctaagaactgggtgatgcggatgctctttctggagcagcctttgccacaggctgctgtagctctgtgggtaaagaaggaattcagcaagtaagtctcagccagatacaaatttctcaacagctacatttcccaaactgctgttccttggagcacttccaggaagtgttaatagatatatcacaaaacttaaaaataaatacatttgggaaactctgcatattgccttttcccttttatttatttcccagctgagatcttgctttcaaatgtatcttccctcttaaagagttatgtgtgatatctgtaatgaggctctgataagtaatgcagtaaagaatttgtcttaggaagatactaatttcactctgtggaacagtgttccaagggtcagcaagttcagaacaggcagagatggtggcttttatgggcctcctttttgttttccaaataccctactcacctctctgcttctgttccagggctcaggaggaaagtacagggctgctgagcggcctccggatctggcacacacagctgctcccaggcgggctccagggcctcatcctcaaccccattttccgccagaacctccgcattgcccttctgggtgggtatgtcacttctctctcttcctaagctagggcaggggaactgctgcttattaaaccactaattaaactttgggagggggagctcctgggggcctccccagaaccttgtggtctccacgttgggaactcctttaggagtaagttggaccagatgtagtgtgtggtgtaggaaatgtcccccactcatggcccctgaggataagggtggaaagatggcagagggcagcaaggaacacagacagggttccttactctttttttgttgttctgttttgtttgtttttgagacagagtctcactctgtcaccaaggccagagtgcagtggtgtaatcttgactcacggcagcctctacctcctgggttcaagtgattctcctgcctcagcctcctgagtagctgggattacaggcacccaccacgacgccaggctaattttttgtatttttagtagagatggggtttcgccatgttggccaggctggtcttgaactcctgacctcaagtgatccgcccatctcggcctcccaaagtacagggattacaggtgtgagccactgcgcctggccagggttccttactcttggcccatcctggccgtagggggaaggcctggtctgatgacacaagtcagctgggaccagacaagcatgcccgggacgttccctcccttgacaagtacgccgaggagcgatgggaggtaagcacttgggagtgtgtgtgtctctgcttgtgcttctacttcccatggcccttggggcatggtctccctgttctcttctgttcttcaggtggtcttgcacttcatggtgggctcccccagtgcagctgtcagccaggacttggctcagctcctcagccaggctgggctcatgaagaggtgaggaagccggaggtacagcagctctctgctgtgccatctccttgggtccctaagaaatggtatctggggctagtcaagatcagaggacattagctggaaaaggcaagctgagtagaatatagccagagataccaagaaaaaacgtgagtggacaagtggggatagtagtctttctctgcatatcaccatcattgtcctggtctttgtctctagtactgaacctggagagccgccctgcattacttccgctggcttccagttcctgttgctggacaccccggctcagctctggtactttatgttgcagtatttgcagacagcccaggtgaggaggcagggccacttaaccagcatgctctgctcctctcaggtctcactgagagactcctgcctacagactgttccctgattttctcttctctgtccctttcttcccattgtctccctcccatccctcctcctttgtctctgcctctttctccctagagccggggcatggacctggtagagattctctccttcctcttccagctcagcttctctactctgggcaaggtaagcagggggctgaaaggtatagagatgggaaggggaaagcaagttgtggggcagtagagtagactgagaagataagaatgaaaacagaacgaacagagatggagaaagaaagaatgaatgtatggggttgggggtgggtgggttgtgttttggaccccagctggaaacctctgttcctcaggattactctgtggaaggtatgagtgattctctgttgaacttcctgcaacatctgcgtgagtttgggcttgttttccagaggaaggtatgagcgcctagataagtggcttccagggaagaaacagggtggtgtgttgcctttgcctttaaaaaggagtggggtcttggggcagtagcaggaagcagttgccagaactgaatacttgggtctctcgggggagagaagttgggggttgaggttctgcatcttgggagggatctgatatttcaggcaggaagatgtaaggcagtgacttctgagacaaggcatctgcctttctattcttttcagaggaaatctcggcgttactaccccacacgcctggccatcaatctctcatcaggtgtctctggagctgggggcactgtgcatcagccaggtttcattgtcgtggaaaccaattaccgactgtatgcctacacgggtgaggcgggacagagggcccctggaagaggaggttgggggtgagggaatgccagtttatgttcgtgtttacctggcagtctacagagctctctgacatttctcatgacacttgaaagaagggcttgagggagtctgggtgtgggggtggcctcctcatcctctttctatccctggctcagagtcggagctgcagattgccctcattgccctcttctctgagatgctctatcggttccccaacatggtggtggcgcaggtgacccgggagagtgtgcagcaggcaatcgccagtggcatcacagcccagcaggtattcccacttgggagaggtggagcaggaagacaggctgcacttgggctgcgggggacaggggtcacattatggaaggctagctctgagtctgttataataggtggtggtgagttgtctgtgtttgaagagaaatgaaggctttgggtgtgagaataggtagacccttgaggggaaaaaaacatggagggaggaggtatagatctggatttgtgcctcggcactgccacatcctaactgcgtaaactagacatagttgttttgcctctgtgagcctcagtttcctcatctagtaaatgacagttcttacctcagggttgccgggataattcattggaagaataggggcaaagcattgagctcagcacctgtcatgcaataaatgctaaaaaaagaaaatagtagctgctgctattttaaagaaagaaaaacaaaacattactggaaagggcgaatgtgccagaaaaggaatatcccacgttgctgggagcagcaacgtgggataacagctgaactgggataggtggagttgatgacaggagttatgagtttttagaataagctgatgttccagtgacattaggtgacagctcagatggctttcctgccttcttgctggagccctcatgccattcttgtctgttttcctagataatccatttcctaaggacaagagcccacccagtgatgctcaaacaggtatagacaggctccaagatgtcagaggctggcagctggtgatgacatgatggaaaagaaaaaggggcatccaaatctggggaagaaacagagggccgggttgtctggggcagtattctgagtccctacagtcaacccttgctccttgcagacacctgtgctgccccccaccatcaccgaccagatccggctctgggagctggaaagggacagactccggttcactgagggtgagtagcttctggtggccaagtcttggtcattggccagagaaagggcagacagttcagtctgcattttattttttacttcatggactaggagagaaaagctggcaagacagttttttgttgttttggggtgagtcggtagtaaacaaatcgtcccaaatcaatgcactttggatttggctaggtgagggaataattcacagtaatttgtattaggcctttctgaatatggctggatcacactggtgttaagatgaacccctgagcagacaagcatagagaattagtttgtaaaattgcggtgggggcaagcccagaccgcgtccagggctgccaccaaggagctggggggattcccaataggagctccgagcttcactttctcgtcttctccccgcgcccctcccgtcctgccgaccccaggtgtcctgtataaccagttcctgtcgcaagtggactttgagctgctgctggcccacgcgcgggagctgggcgtgctcgtgttcgagaactcggccaagcggctcatggtggtgaccccggccgggcacagcgacgtcaagcgcttttggaagcggcagaaacatagctcctgagagcgcgggacttggacacggacctcggcgggcgggactgggcggggcggggcatcagaactcaggtgttttttatttacgcgtcagggcttttcttgtttaataaagttatgatagctagcagtgcggtcccgggcgcctccccgtggggtttgccttcgcggcggactcgctcctctggtctacagcctttggaccggtagggagagggtggggccaaagccagctgctgcgcatgcgccggccggggccccgcccccatgcgccgcgcggctccagggccacgttccagggtcgggtttggtggattcctcagtccctgccgccgcggggcgccctgggatagcggcggggcctcctggtgagcgcgcgccggggcggcctccgggaagtgggagacgctgcgggtcctgggcccaggccttgggatgggcgggaaggcctggccgcgccgggctgtgggcactgcaggaggcccctgtgcaggtggagatcgccgcggccctggcgggactctttgctggctcttgggcgcgctgatgcccatcatctccctgagtttctgagccctatctctcatgtgtcagtggtcaccgccgaatccagacactccggccctgttccggaagagccctgatatccgtggctccatggcgctgtctgtcgataccatgcactctagctctcaaggaggaaaggttttgtggaagggaatagagacttggaataacagacctgtgctaattagagacgggaaagatggaacaaggggagtgacccttctccacccccatatcctaatgtgctctctctctatccagaacagatctcggcccctttccaaacactcctgatgcctcatttgcctctcgcttcttttcgaccaccattttgggggctgaggcactcacggggcctccccaggtttcactccgtttctacacagtcggagccccatggatctcccatctcccggaggaaccgtgaagccaaacagaagcgcctgcgagagaagcaggctactctggaggctgagatagcaggggagagcaaggttaggggtcagacagcttgtccttgggtttctgagacttgggaggggctggaggagaccggctgaaatgcagtctggggtatactggatcccagcctcttctgctttctcttctcagtcacctgcagaatccattaaggcctggaggcctaaggagttagtattgtatgaaatccctacgaaacccggtgaaaagaaaggtaagtagaataagtaagaaggccttttctttcacatatgtgttgcccatttggcctgccgaaatgcagcctgggaacaagttcagtggttagtggagctctcctctgccttcacagatgtctctgggcccctgcctcctgcatacagcccccgatatgttgaggctgcctggtacccgtggtgggtacgagagggcttcttcaaaccagaatatcaggttagtatctggcagggaggggtcctaaattgtctccaggacagagtggcccttgaatacaactggacctcagagttgagctcacattgtagaccttgtcttctttctggctctggtgtctccaaagatttctcttggcaggttccccctggccaattccctcctctccactctcctcttatttgcaggacagttcttccttgaagttctttctgttctggagacagtagagggtgctctttccccaatccaattctctcttgcccctttgactttttttcttcctctaggcccggctgccccaagctacaggggagaccttttccatgtgtatcccacctcccaatgtcactggctccctgcacattggccacgcactcacggtggccatacaggatgccctcgtgcgctggtgagaggggagtgggggctgcttgagttcttggaagggaaataggaagggcaggaatgagtgaggataaacatttaagctcaggggctcacaggagggcatttttgttgcaggcaccggatgcgtggggatcaagtgctgtgggtccctggttcagatcatgcaggaattgctacacaagtatgtcttttgttacctgttccttttcttgggcaaaagcaatttcttcccccaaagcaacctgactctgttcatttgccctgaatctaactgcaggctgtggtggagaaacaactgtggaaggaacggggagtgaggagacatgagctgagccgggaggccttccttagggaggtgtggcagtggaaggaggcgtgagtatgatgggcaggactcggggggcccagatggcagatttggtttcttgcctcccaccactatcactcctgacttgtaatccttggctcttcccgacacagctctgacttcctcagagatggaagctctggagcctgttaacatttggtggagtttctaagccttatgtgtgtggatattatatatgcattagaatattcgtgtgtgtgtgtgtgtgtgtatatttttatatatatatatatattttctttctctttacttaccccaatttctcttgtctaaatctcaccttcttccactccccattcccacctttcaattcccatggaattaccctcattcttctgggtctgttatctcatgccatctctgtgaagcatccttggatttcccacaatatggctgtccctcctctcttcctatagaatcttttgcctcttttaatatcttagaaaaccccatactgggtttgtaagtccatttctattagcctctagaggctagatcaatgccatcctcacttgattttcctccaacacctggcattgctgggggcatcgctgggcctggtacataggaagtgcttgggaagtgtttgctgacaaggatctctctgggcacaggaaaggtggagagatctgtgagcagctgcgagctctgggtgcctccctggactgggatcgagagtgttttaccatggatgttgtgagtgttctgtgccttggtccctgtgagtgatgggcgatgtttagggatctgtgtggggcagggaggcagcaatgcctgggtccctgagcagggtgatgggctgagaagtggctcttagaggtggacactcaggtcattccagggctcctcagtggctgtgactgaagcttttgtgcggctctacaaggcggggttgctgtaccggaaccatcagcttgtcaactggtcatgtgctttaagatcagccatctcggacattgaggtgaggcggagagagggaagcaggtttgtgagagctctgaggcagagtggtcaatgattaagagctcagactctggagccagggtgcctggattcaaatctgatgcctgcctgttacagctgtgtggcttttggcaggccgtttagtctctttaagcctcagcttcctcagtctgtaaattagagatgatggaatgcttgcatcgtgggggtgttgtaaaaattaaatgagaattcacataggtgcttggcaagatacctggccatggcttaagtgctcagtgaatatttattagaagtgtgactgcacgagcattgggtgagggcagagggaggtagctcccgaatcctccaaatggcttttagatggattgcagggaggctgggcagatggatgagtggcagagtgaagcctgggcatgagccttgcagaaaggctgccctctgacccagctttctcggtgcctccaggtggagaaccggcccctgcctggccacacacagcttcgactgcctggctgccccacccccgtgtcttttggcctcctattttctgttgccttccccgtggatggagagcctggtgagcatagtactctgcagggtcacccgtttacctccatttttcctgttttctgaagcccatgttgggctgctaggaacccatcagtccatctctcacatgtaccttggtagtgttcacctcagcgtgggcacttacccagggtcttctgggggatgtacaaaaagtgcatgtggtcactgccctttgagagtgtggtgtgattcttcaggagtgcgctacccaggaaagagatcagttctaaggtatgttttgttttgtttgtttgtttgtttgttttgagacagagtctcactctgtcacccaggctgcagtgcaatggcacgatctcggctcctgcaacctctgcttcccaggttcaagcgattctcctgtctcagcctcctgagtagctgggattacaggcgcgtgccaccaggcctggctaatttttgtatttttagtagagacggggtttcaccatgttggtcaggttggtctcgaactcctgacctcgtgatctgcccgccttggcctcccaaagtgctgggattacgggcgtgagccactgcacctggcctctaaggtgtggtttttacggtaaatgttctgaagagctcagagaaagggaagacagatgagctggaattgtcagtggaagcttcttgtaggagctggtgctccccctgaggaatgtacagcatttgtgattaggacactgagaatccccagtgtcctctgggcacccagcaagaattctattatagttgctttaattaatgctgcccccatttcttccatgcaaattatcagggaattctttagcaccagagaccctctcagacctctggtcatcagcttatgggaaaccctgggttcctataaacactgctcctacttttttctagtcactcctgggggcctcttccaccttgactactccctgccccttcccctttccagttctactgcctttagctatgttggcagtgagaggtgaggatgatgaccagctgtaagtgtttaaatgtttatcttcagatgcagaggttgtggtaggaaccacaaggccagagacgctgcctggagatgtggctgtggccgttcatccagacgactcgcgatacacagtaatacccagtgcgctcctgcactctggcccgccccgccaatggccttctcttctcttgggttttaaatggtggctctttctctcttgcttctacttccttttcctgagacttctctcagtggttctgattggactccctcctcctcttatagtttttctgtagctcaggggttgacaaactggcccatggtcctaatccagcttgcggcctttttttttgagacagagtctcgctctgtcaccaaggctggagggcagtggtgtgatcttggctcactgcaacctccacctcctgggttcaagcaattctcctgcctcagcctcctgagtagctgggagcgtggcaccatgcccggcacgtgccaccacacccagctaattttttgtatttttacaaaaattagtaattaattttttttaagtaatgtaatttttaagtaatgttatttagtagagacggagtgtcactgtgttagccaggatagtctcgatctcctgacctcgtgatctgcccacctcggcctcccaaagtgctgggattacaggcgtgagccgccgcgcctggctgcttgcagcctttatattatctatggctgctattatataccctctccagctctgctgcagtggcataatagagtaattgtgctgagaatgaatttgtctctaggcccaaaagcctaaaatatctacattctggccccttaagagtttgctgaccttgctctagcttgctaccttccactttctaccttcttattcctggggttctcacgccccagcccagacccttccaaccctcacaggtgcctgtccttgatccctctcccttcccttcagcatctacacgggcgacagcttcgtcaccccttgatggggcagcctcttcccctcatcacagactatgctgttcagccacatgtgggcacgggtgagtggaagtcaggggagggagagaaagttgggggtcctggaggagaggggagggaaccaggaggaagaggaaggtgggagtgggagatcctcatatagggtggtctgagtggggaatgggagggaggcacagacagagaaagtcgcaggggctggggcggtgcaggtgatgatgatacatctggaaaagcaaaagccaaggtcaggttcagtactcaccatggctgtgctccccaaggggcagtgaaggtgactccagctcacagtcctgccgatgctgagatgggggcccgacatggcttgagccccttgaatgtcattgcggaggatgggaccatgacctccctctgcggggactggctgcaggtggtaccaccctatgttaccccatcctttgggggctctctgtccccctaatcctcctcctagtttcttatttctctagaggccttcagtctttactcttgccgctttttctccagggtcttcaccggtttgtggcccgggaaaagataatgtctgtgctgagtgaatggggcctgttccggggcctccagaaccaccccatggtactgcccatctgcaggtaacctcattttaactcctttactaagggctaccccaaaagggaatgtatggagcttaagggtgacaataggatgggctctgcacccctccgttagaatacgagctccgtgtcggttttattcgctattgtatcctcagtaccaagggcctggcatggcatggggtcttgtgcccctgggagaagtcacagggccggaagagcagtggactcaccctgtctctctttcagccgttctggggatgtgatagaatacctgctgaagaaccagtggtttgtccgctgccaggaaatgggggcccgagctgccaaggtgaggctgcagtgtaggaaggactggggccaggggttgggggagctccctgagaattggaatgaagaaatgggaagcaggagacctcctgccctgaagacctctccagctgtggtaactgagaggatgtgtgggatggaggctgggcggcccagcaagggctggctcatatccttactcaagcccagaatcttggcaagaggcttgggaggtcctttctgagttttaaaatgacctcagaggccactcgtcctatctgtggaggtgcggccgtgcaggaagggcaacattgtctaaagtcccctttctctccaggctgtggagtcgggggccctggagctcagtccctccttccaccagaagaactggcagcactggttttcccatattgggtaagggtagggtaaggggagctcttgtggagatggggaggggggactgactggttattctaagacttcacgaatgtcctcccggcagggactggtgtgtctcccggcagctgtggtggggccatcagattccagcctacctggttgtagaggaccatgcgcaggtgggtaggaagaagcacccggagggccgagtgtggcacagagcacctagcccaggagtcagagctccgcagggccaagtcccgctcctgcctggtcatgtgcttcatgctcatagtcatgtaaccttctgcgcgatcaaggctccctgaagtggcatttctttatctcacccctgggggaacctggccactctaagaccacatgaggacgtgaaaaccaagtgacatttacacctgtcagctgttcttcctcactctccccaaccccttcctacttttgcagggagaagaggactgttgggtggttgggcggtcagaggctgaggccagagaggtagcagcggaactgacagggaggccaggggcagagctgaccctggagaggggtgagtgcctgagctggggagggatgtacaggggagcgggggcctgggcatctgggcctttgaggggaacagatcccaagatacagaaggtagggtcaggaaagttgggaatggagccaaaggggacagccctggtctctgggggtgggggttggcctagaatggtggcagcagtggtctgaggtcctagaagccaaggttccaactgtccccattctttttctgtttcccagatcctgatgtcctagacacatggttttcttctgccctgttccccttttctgccctgggctggccccaagaggtgaggtgggttgagagggcgaaagtgaaggggaaacgataaggaagggatggctgggcccccacagaggcttgaggggggcctggggcctgggcctcttactgctcctcttccccctagaccccagaccttgctcgtttctaccccctgtcacttttggaaacgggcagcgaccttctgctgttctgggtgggccgcatggtcatgttggggacccagctcacagggcagctgcccttcagcaaggtaagagcccttcagtgccctgccgctttctgtgactccagtgttccccaaaccttgtcctcccttctaacccctaatgtggtcctttccacgttgctgattcctttttcctaattcacttcctaccctacccccaaaagtatggaggccagagatcccaaggcacctccaaggaaacccccctctgttgacccctccctgcccccaggtgcttcttcatcccatggttcgggacaggcagggccggaagatgagcaagtccctggggaatgtgctggacccaagagacatcatcagtggggtggagatgcaggtgaggacgaagcacccactagagggacaaggtttgcagggtttgcaggagagaggaaggcaggctgagggaggagtgaggccagcaggtgtgacccttatagaggcagggccttcgacctgggtcgtgaattgcccccttccatccccaggtgctgcaggaaaagctgagaagcggaaatttggaccctgcagagctggccattgtggctgcagcacaggtgagtcatcgctgcctgccccccaccagctctagctcaccacctctggcttcctctgcaacccaggtcctggccctgcagccacaaaggcatctgccacccttcttcttcctctggttgcagaaaaaggactttcctcacgggatccctgagtgtgggacagatgccctgagattcacactctgctcccatggagttcagggtaagcctgggcgaggggtgtcggggtgagcagagggcagcgggcacctgtgcaggggcagggcaggggcaggacttctggtgctgctgccacctacatgcagactacctcgattcttcccttccagcgggcgacttgcacctgtcagtctctgaggtccagagctgccgacatttctgcaacaagatctggaatgctcttcgctttatcctcaatgctttaggggagaaatttgtgccacagcctgctgaggaggtaagagaaaacagaggtgcttgggagtagggtagtcaggtgtcagagggccaaggtggcatctggaaggaaaggaggcaggggagggggagtcaggccatcctgccccctctgcctgcagctgtctccctcctccccgatggatgcctggatcctgagccgccttgccctggctgcccaggagtgtgagcggggcttcctcacccgagagctctcgctcgtcactcatgccctgcaccacttctggcttcacaacctctgtgacgtctacctggtgagtgaggctgggggaggcttggtattcccatgcctgcttctaattcctctggaaatttccaaggcagagagctctggagttaataagttcccaattgtcccctcagttaggagaggagaggagacgagggagtctcagttcccctcttcctgggactggttttggcagtgcagcccaggcactgttgcctgcctgtcacctggggagaggaggaggagggagacttctagaaatgtctgacaagtcggtgtcagaaggcagaggggaattttttcagtccctgtagttgctgagtttggcccatgggcaggctgcgtgctgagagaggcctgggagggactagcagcggtctttagaccaggggttctcacgctgtcctacgtccaaagcacctggagggcttgttgacggtggatcccccccgctccactgccaccccagagtggctcctttagcaggttggggtgggggtgggtggtgtaatgaatattcatttcttgtcccaagtggtgctgctgctgctggctgtggaccactgccctagctcagccttttaaaaacctctgtcccctgttgataagcaaaaaactcaatgatttttttccctaaactacatgtttccctggaaatcctgtccctgtgtactgcagagaattgctgtcctggagtccccttctttgtgctgagtgtgtcctgggactgtggatcatatcagaagtgctaagtgcttctgcctgtccctctctcccaggacccatggcctgccccactggcgggtagcagtggctgtagggaggagggctgtggccctggacctgtcctctgaccattggcttcctctccaggaggctgtgaagcccgtgctgtggcactcgccccgccccctggggccccctcaggtcctgttctcctgcgctgacctcggcctccgcctcctggccccactgatgcccttcctggctgaagagctctggcagaggctgccccccaggcctggttgcccccctgcccccagcatctcggttgccccctaccccagcgcctgcagcttggtgagtcccaagcaccttggagtgggtctgtgggtgaatgggggggagcaccttctgaaggggtttgctgcagggggctcatctgcaggaatggttcgtactttactgtggagccctggggaagatggattgttcctgcagggttgctgcgatgaccctagggtcttgagggacagtattagcgtagtgctcaagagcaggactctgttgctagactgctatttttgagctgtgtgatcgagcctcagtttcccgcatgtttaaactaggaacagtaatagtatatgttatggttgtgatgagggttggataagttagtaatagggtgtccccaaaatctcagtgcagctttaataacttcagaaggataaatgctatgaactcacccaaaaattattttaaaatttaactatttaaatttatacttatttggttttgagttttgactaattcattttaaattctaatttatttttggttggccatttcaatcacagcaactaaacaggcatcaaacactgatcatctaaaacctcttaaatgacgcctcactttttgtcatgttccttgagatagtggattttctgtggtgctgaggacagatctcattgccctaaggagatggggtggatgggtcgagaagagagccagcagggttggtactgagtctcccaggagcccctttgccaattctgggtcccccccattgccaggagcactggcgccagccagagctggagcggcgcttctcccgggtccaagaggtcgtgcaggtgctaagggctctccgagccacgtaccagctcaccaaagcccggccccgaggtgaggcaaggcgggtcctgggctcggatccctgcaggaaaagggggctggtggggaaaagagcagagcctgaagggccaacccccccgttaggaggtgcagggtaggaagggaggcaggagctgaggccttgcccctgacagtttctttctttccagtgctgctgcagagctcagagcctggggaccagggcctcttcgaggccttcttggagcccctgggcaccctgggctactgtggggctgtgggcctgttacccccaggcgcagcagctccctccggctgggcccaggctccactcagtgacacggctcaagtctacatggagctgcaggtgaccagaggggatggggagggttagggcaggcttgggaagcatgctgggaggaagggaggggctgggctctataaagtaggggaagggaccttctaatggaggatggaggcctggcagcaggcggatgtctgagccttttctccctgttcttccccagggcctggtggacccgcagatccagctacctctgttagccgcccgaaggtacaagttgcagaagcagcttgacagcctcacagccaggaccccatcagaaggggaggcagggactcagaggcaacaaaaggtaaggctgagggaggcccccagaaggctccacccctgagggaatgtgggccaggaggggcctcattcctggatcctcacctccttttctcctcgtccagctttcttccctccagctggaattgtcaaaactggacaaggcagcctctcacctccggcagctgatggatgagcctccagccccagggagcccggagctctaactcatcatccccatcagttttcctccctctcagacctgtctttgaggacaaacagatttgtcagctgtcagggtgcagtgggacgtcagagactatgtggtccatcgccttcattgtgtaaatgaggacacagactggcttggtcgcagtgactgtggtgtccttgagatgctcacattactgcccggcctgcctcccacctggaagtctgggaatgaggagattgagataaacttttgaaatcccaaacatgtctgtttatggctctttggtcccctttgctcccagtggtgacttttgtgcttctgagttgtcccctgagagcttggtctgggaaaagaggaggaggggtcctcgctggaggaagaggaactttctagtcatgggtagggtatgggcacagtggttccggttctacctactttctggactaactgacagtgccctggcttttgcaggctctttctcctccacttctcactaaatggaagcttccccgctccttggctgtatccctagaggtgctgagagaagtaggacttcctccagacctgatgggctgcaggctgtgctgcagatggtgtgcccccaccttctgtgctctgacacctgagtgcccagcctctgagttacacattcacagcacagccagccaccttacccacgccaaacaccatctcatctccatggaattcaagggcctggcccttccacgcccagagtacattctgtccagcagctctgagtagcctgtcctgggctgggtcctctgtggtgctagatgtacaatgccatttaatcctactgaaaacctcatgaggcgggtgttagctccattttggagatttttatttttactttatttttgggacagggtctcgctctgttgctcaggctggagtgcagtggcataatcatggctcactgtagcctcaacctccagggctctagtgatcctcctgcctcagacttctgagtagctgggaccacaggtgtgcaccactgtgccctgctacttttttttttttttttttttttggaaacggagtcttgctttgtcacctaggctggagtgcactggtgagatcttggctcactgcaacctctacctctctggtacaagtgattctcctgccttagcctcttgagtagctgggattacagttgtctgtcaccacgcccagctaaattttttttgtatttttagtagagacaaggtttcaccatgttggccaggctggttttgaactcctgacctcaagtgatctgcctgcctcggcctcccaaaatgcttggattacaggcatgagccaccatgcccagccctgccctgctaatttttaaaattgttctgtagagatagggttttgccatgttggccagggtggtcttgaacttctgggctcaaataatccacctgccttggcctcccaaggtgttgggattacaagcataaaccactgcgcccagcccccattttggagatgaagacgtgtgctcagagaaaagtctccactgggacctaacccaataaattaggtgcaggctctttctggctgctgtaactaaacttcaaatataatggtggcttagatgaggtggatgtttcttctgctgggcataagtagtgcagagatctgcaataatgggagcccacacctccttcaatcttattttcctgccattctgatgcattgtcaaacttcatgtccaaggtctgcaccagctcccatcaccgtgtctgcatttccacccagagggaggagggaaagaaggggatgggcagttttctttttctttttactctgtttcagcaaggtgttttttttttttttttttttttttttttgagcacctgctatggatgggctgggccttattctggacacttagattcatcagtgagtgaaacaaaattctgtgcccttgtagtactttccttctagcaggacagtcagaaataacatacaaatgagtgaacgatatactatgtttgaatgtcatgaatgcaggggagggaaaaaggatagaacaaggtaaggggactctaatgtgtttgtgtggcggggggcaggttgtacttttaaatagtgggtcagggcagaactcactgtaaaggtgaggtttaagcaaaggcttgtaggaggtataggaagagcgttccagacaaagggaagggccagaggaaaacagatagaggcatggtcagacagctcgaggagtagcctggagaccagtgtggtggggcagagtgagaaggggaggatggtgggaggtggagaaacagaggtgagggtggggaattggtggggggtagggaagactcaaggcggacaatctggggcttgtgtccaaaatggtagccagttggctacctaaagcattaaataaaataaaaacgttcagtttcttagtcgtacttgccatatttcaagtgttttggtagttgcatgtggccagtggctactatgttcgtcagcacggttataaaacatttccatcatcacagaaagttctattggaaagcactgatctaagaccttataggctgtttcaagaactttgcttttcctcctctgaaatggaagctcctttcttttcaaggatactaccagaaagttgcccacctcctttctacttgcatcctattggacagaacgtgatcacatggccacagctagctgcaagggaggctgggaaatgtaatgatccacatgctgagttgaaatctacatgactatccaaaaggaggaggatggctgttaggggggccagttagcagtctctgccacccccaggtctggtgaaccccaaagcactcttcactgcactgctctgttttgagccttgggagacaattctttgagaaaaataatctggaaatcacatcctggtgatctcaggccctgaagtctaggaaccaggttgaggtgcatttagctgtctgctctaccaacctcttggacattcagatatccagtcccccaacttgtttggggatcctcacagctgccccatgggcgtcacctgcccattactgcaggctaggggcaagtcataaaatactagtctcctttggagccccctgctacctctccttgggggctaattgtcccaggacagttgtgaaggaaggtagaccaattttttaagtgttttttttccaccctgccattttctatgctcccctcatcttcagtgatgctccatactgaactcttgttgtcttctgtctccaaaggagtcagtctccaatttcatatggagataatggagggttgtgtaggtgtggggggcagagtgggtaccacagaggacagagagcaatcctatcagtaccccccactgctcaagtctgagctgcaagtttgtgttttgagagctggtgagaagtcaatttttttttttttttttttttttttgagacagagtcttgctctgtagtccaggctggagtgcatggtcttggctcactacagcctctgcttcccaggttcaagcaattctgcctcagctccccgaagtagctgggactacaggcacatgccaccatgtccagctaatttttgtgtttttagtagagatggcgtttcaccatgttggccaggctggtcttgaactcctgacctcaggtgatccacctgacttggcctcccaaagtgctgggattacaggcgtgagtgagccactgcgcctggccaagataatcttgagaaggtggtcaggagtgcctgcctcagaaatcagcataaggaggaccctgaaccccaggggactaggagttatatgttgggaccaggtttccatcctaacagcaatccctaccatcctgccgacgacctataagacaggctgtgatatgtccctaagtagcttccctgtgtgatcctcacaacaacctgatggtgcaggaataatgagaaaaactcagaattgtgtaaaaacaaaacaaaacaacaacaacaaaaaccttcccccaaactgggagggagctgagaggccaaaaagtgactcagacaagtccagcttggtgagtagatgagttttttaggacttacatacaaggcactcctggatggcagcaggacagctttagagatccgtgctgcctcccatgctaaagctgctttcaagctaattttctgactctgccgactgtgtgtgtgcgaatggactgttttccttggtgggttcccagatactctccgggatgtttgggttctcagggacacctgctcctcggccaggcaccgtgaccttggctcgccacctggccttcaggattcaggcagtggcatacaccgttaagtaacctggtaggggacctgtcacactacagcaggtaccatcattgttcccattttgcgagtgaagaaatggaggctccaagaggataagaaacatgcccaggaattcacatgtgggctggtgtcacctcatactcacatggttaaccaggacaggctcagcttgcacctggcctctcctccccagcacttgcgcctggctgggcatcctctcacaagctgaacccgtcatctctcacctgagtgcccacccacctcccaccccaattacctgtgtggatccatgggccaggggaaccatgtcctgggggtgttctgcctatgtctctttctttggtttttgagcccctggccccaatgcttaagcaaagggaaatgaaataaaaatcttgcttaaaccaagacctctgtctagtgcctgacttctccactgctattagatctcaggtgagtgacttgccctctctgagcttcaatttccttatctgtaaaataggataatgatacctagtatgccacattcaagactgctgcaagcatcgaaatagggatgcaggagaaaagcaggacttcaataaatgttgcttctctttattcccaggtgttccaaagatctcaatttggtgtgtgttcctatgcatgcgtatatgtgtgtggtgtgtgtgtccccaaacaactccccagatgccttgtaggcctgtgacactggtgttgagggagacattgtccatccctggaaccctctgctcaacagggggacagtcagagacttgagcatccaacccccacttcctgccagctctgtgctcagggacccacagagtcaagcaagttattgaattcagcataccgaattttatttattgccgctcaggagggtgggggcctgctgaaagacagggtcggggcctgcctcctgcatccccggcccaaaagcccgggccaagaaggacacaggcttcaatggctgtcatgtgttgcagacaacatggtgttgagatcttgcatggtggagggtgacgctggtccctgaagggagatggaggaggaggcagagctgggaacaaagggttaaagggcgccatgtaagagagctctccattcccaccacggagacatccagaccccagcagaggcccaaactgactcacaaacacacagccccatctttccccttccaaagaactaccttttcaagcaattccaggaagctggactcataggaggaatttgtcagaaaagactccttcagcttcagttgcaaagtcatacccggccctgcggatccagaagtacagcttaggacccagcagtcagggctgattcctccggagacacagaaccttcctgctcacgctccccggcacagttcctcttccccagcaatgcccctccagagcctcttggaagctcaggactggggtgtctctgtcactctcagggaccatgaagtcccaccccttttctctggcctcttcttgccacagggacccaggagtcctgccctctagccctcacctgttccatgtgagctgccaaggagggtcaagaggaggacaaggggcagcccagaccccatagtggccactgcgctcctgggatggaggagacactgaagtcccggtggcctctccttaacaggcctgtttctacaccccactcaagccttagcataagtgtttgaggggaaatgggaggaggaatctggtcaactggattttccagttctcccagtaagagaggacccaggagaggaccattcactgtgcttttggggaaaatagaaggaagtcccctcttttccactctgtgtcccacccctcccttgtgtctccaggtttgagggagtgagtgcgggtcctacagacagggaaatggagagggaagcggggaccagggaggcgtccctcctgcaggtgtctgggcccccacccatgcccgggcctcccaaggatctttagagattaattattaactgcagctaattttcatcattcttgacaccgaagggctcaggaatgtgggcccaaaagggaggggtggattaagccaagtttcttccagaacccaggtgtcctgctccctcaggttttttttttttaaacactagtcaagtgcagtagtgaaaagagtagaaggagtagaacaaggagttgggtctataatggactgtgaacactgcttccccagccttggtggctttctagatgagaaatctggtcatgggaacttccattgctgaacattctgttttacttgctctaacgcatcctggattgtcagggggagacacgagtttcctcagacatcctctcactcctgccttgtgcacccatgaaaaggggacacccacctactcccggccgagatgcctacaggcaagcgctgggacaggcaagcacaggacagatgtgcagagggagttactgaccctctttagaaactaggaaagtaaggcacagagagggtaagtgacctgctaaggtcacccagccaacaagtagcagagagattagaacccatccctctagccagacaaagagacacaccagccatggaaacttgcttgaacacacaagggcacaggccagcatcttcctatctgccacttccctatgcagcctctccaccttccccaaagccagcgggactgagcacagagagacagaggcagagagagcactgggcagaggtggggagagcaaaagcaagatggggaaacagagatagaggcctggtctgcactgtaagtgtaaagtgaggcaaccaatgactcccagacttgcacaggacaacaggaagaccacagtgggaagaaagcatggaggagaagagcagcaggcacaggagggacgagcaggaggtagaattgggaacacagagagatcttcctcggagaagagtaagggccctccctccctccctccctcccttcctccctcccttcctccctccctccctccctcctttccttcctttttttttttttttttttttgacagcgtctcatccctgtcgcccaggctggggtgcagtggtgcaatcttctcctggctcagcctcccgagtagctgggattacaggcacccgccaccacagcaggctaatttttgtatttttagtagagacaaggtttcaccatgttggccaggctggtctccaactcctcacctcaggtgatccaccccctcggcctccctgagtgatggaatcacaggcgtgagccaccgcacctggcctcccccacactttctacagccatgtgctaggctcatcactaagtattcctttatagcgcataagcgcctgtgaagtaggtactagattaccccgattttagaggtgaaattaagacttaggccttgtgacttgccagagaatgcacagctcagcagtggtggattccagtgcagtggactcagccctggtactgagcttctgaggattcagggctgtctggctccagagctggggtctgaccttccatatcacactgtccccaaacatgacacgtgtcttccttggtgccccttatctcccctttccccttccctgtcaaaggaatggaaagctctgtcagctgcagccatctaggtgagacacggctcaggtattgaccttcccagcccactcttaggtttccagaaggtcagatgcagtcctagaccctcatggttcccctacaaccccagcttccaaatcctgcttccctgagggactcatacgtcctgacttccaacggttgtacttctaggaacaagaggatgaccttgggataggtcatttgggtctccccttttaaaggagggtctgggctgtgaattgactcagacctgggggacaggtccctagtccaggaagagcccaagggccaggtgggggagcccgcaggctcttactcactctccccctcaccctgtgcttcctgggatcaggctgggacaggttaatcccctgggacaacttggcgacctctctctggggatggagattctggtgttggtggaggccccggcacaactggctctcccgggactcataataggccccagagcctttaaagagcctgggagatgggcctggccaacacacttcaactggtgccatggacactgtgctggtgctgctcctgggcctgcaggccttggccggacccagtgagcacttgggcccagacagggggtcttgaggaaggacatgaatttgggacccagtgggatggccaactcttctaaccctgttctatggtttatcttcttttttcaacagttcagctgaccctactggggacttctgacacagtatccccaggtctcccctgtctctggaagtctccccactgtctctggaagtctctcctctgtctctggagctctccccggtttctggaagtctcccactgtttctggaagtcttcccactatctctggaggtttccccactgtttctgcaactgtccccactatttccaaaagtttccctactgtctctgaaatcttccctctgtctctggaggtctccccactatctctgcaactgtccccactatctctagaagtctccctactgcctctgggagtgtctcaacagtttcttcaaactctgggagttttcccagcagtcctcagtctttagctccagccgtttctgggagcacttcaggaacagtctccacatcatcaggtgatatttctgttgctcaacccatctcgggagaacccttcagctcggtctgtagctctggggtggggcttcctgcaagcctggcagttttccagaacctcagtggaagcagctcccttgcctttgtggctatacaagggcctctctttctgttttccaattcatcacctttttctgtcatgattagttcctgttgtatcctaagacttttttggctacttcaaggtcatgaaaatattctcctctgcattcttccagaaacgttattattttagctttcaaatttaagtctattatccatctcaagttaatttctgtgtatggagcgaggtggaagtcaagattcattttttcttcttatgaatatccagaaccattatttccaaggaccctcccctgtccctgccattgaacggtgagcacctatcctgaaagtcaagtgactatttgtgtgggtttttcggtaagttttttttttttttgaggtggagtttcactcttgttgcctaggctggagtgcaatggcgcgatctcggctcactgcaacctccgcctcccgggttcaagcaattctcctgcctcagcctccggagtagctgggattacaggcgcctgccaccacacccagctaatttttttgtatttttagtagagacgggattttaccatgttggccaggctggtgtcgaactcctgacgtcaggtgatctgcctgtctcagcctcccaaagtgctgggattacaggtgtgagccactgcacccggcctatcagtcagttcttactccagggccacagtgcttaaggactacagatttgtagcaagtcttgagatctcatagtgtaagttctccctttttttttttaagagagtgtcttggttattctcagtcttgattttcataacattatttcatcagtttattccaaaaacttgctggagtcttgcctgtgggtgcatttgatgtgacctctgctttgctcttgcttgaatctcttctgttttttccctctgccctcttaggacctgcctcatccagtgctcccggaacagctccaactgtgcctgggactttagcactgagtgttgctgtcttaggagttccactgccaccatggctgggtggccaccacgtcctctgggctcagcatcctggccagttaagtcactcttctaggcactgggtcacttacagtaaaatgttggtgggcctattctctctcatttccctgcagccacccctggctccttgggaggagttcagggagagtcattagctcctgctttcaactgtattttaaacctgtctgaggatgtgtctgtagctcaaaggggttttggtggcctctggtcagaccaactgccagatgcctgttacctggctgctttctcgaaaggttttcatctttcttcctcatgatctaatctctctgttcagggcgagaggcattccttccagagatcacccctccttcttccatcatcctcctcccctccctttcattcctagaaggggagcatagggaataccacgcgggaagtctgacggcaggaaacgaatggaaggaagacaggagatcaggctctggttccccttaaggacaagaatcagggtggagtggtggggagaactggggcttggaggaaggagagtgcctactgaggaccctcccagtgcagaagcatcacagacccagggatgcagaaaatagggcccgagaaagacagtgaggtgcggacctcagtgatgagtctgggactgacagacgtgtccacagggaagaggcaattgagacttggattgaagccctttaaacccccacccccacccctgctgagattctgctcccaaggtgataggagaaaacaccagagagatgaggtctcagagtcagagacatcagtcacagaaagaaagatggaaagtcagagggcagtgggggtctggggggctggaggcaccacttacctcagtcactggccctgtctttgtgccccaggtccgaagccccagaaggactctgtctcagactgggccattgtgttgatcactctcactttggtggcagcaattgtcagcctaatgtacggtatcaagaaggtgagcaatgccatggtccaatgtgtgggatccctgtgccagtggggctgggacctggtgccccaggattcagaggagaacagggctttggggaggggaatgacagcttgcagggcttgttgcagggagggcaaagagagcccttgtctcagtggccgagaaaaacaccggtctggcagggatagggggttggggccactgaaagaggcgggggagtgctggaggctgactggcacgtggaagcactcaactcagctctaggcaatgaaggaccagttctgtggagccacattcacctgggcttgaatccttgtgcaagttacttaatctgtctgtgctccggattcttcattaataataatacttaaataataataatattacatcgcactgattatgtgctaggtgtgctaggtgctgtacatattttagttcacagcaagccagtgatataggaaatattactcctcattttacagatgaggtaattgagtcctggatgaaatgagaatgatggcatccatctcaaagggtggttgggaggatcaaataagcttatgcaaagagagcactaatggtgcttggcatgtattatagtaagtgctcaatatacagccttattcattattattgctgtttttgctcaaagaggaatgctgagtgcctgggttgccaagaggaagcagcagttcatgggaagagctgggctgagcagcaggttcccgggtccctagattaacccatcgtaccctcccctcatctcacaggcctgccagttccggagggagatgagtctggggtgtggctgtggctctgtgaccccttacagcagccaccatgagggggaggctgccagccagcgctactcttgtcaaatgaaaggtggggctggggcagctgagcgcctaccctttggccttccttcttcctctcccagatagtctcattcccagactcccctatcccattcaccttagctgggaccatttcctgcaggtagattcctggggtcactggcccccccaggtctcttccacccacagcgtaaggaggagtctactgtcagtcacaagattctgctctctgtcctgccgccagccatgcagactgcgggaaggtgcccagcttctccgagggcagttttctcatctgtagaaggaaggaccagggctaagtggtctgcaggcaccttccagccctcacggagcccaggtctggacagctggaacccctgcccctcaccctctcttcctagtcccaccctcctccctgacgaccagagaagctctttagctgaggacagtctgctcacggcttcccttctcacttccctccacagggagccccctcaggctggctcttgagcccccaaggccctctgattctctcccctcagggcaggtgcaggaccctcctctgtggtgccccctcggtctgctatgggagggtggtgaacaagttattgctaaataaaatggcacttcctccacttgtctcccagatgctgtgggtttgcccaagtgcatgggcttttgtgtcatgtgggcccggaagggccaagtctggtctctgccagttaccagggcaagtcattccctgatccgaggctcatttatcctcatctgtaaagtgagggtgacaggtgataactcataggtgaggtgcttagtacattcttcagtacatagaaatgcccaaacaatggtagttggcagagttgtttcgtgactggcctctcagcctccagctcagatgaagcaacatagactgactgtaagagactgttttgggcctccacctacctccaggtttctccatcccagacatcagcgtccttggggtggagttgtagctcagagagaagggaagggggtgttcattcacaaacactggttagtgcttattctaaagcagagatcctccacttcagcacaattggtgtcctgggctggataattctttgctgtggagactgctctgggcattataggatgtcccacagcatctctggcctctaccccctagatgccagtagcatcccactccaaattgtgacaaaaatgtctccagaaatttccaaatgttccctgatgtgggcaaaattactcctccctgtacagaaccaccgtcctagaggcttgggtccctggggaaagggggggggggaaggggaccagtgaaaagggggactgtcagtcacccgagtctacatggagttgcagaggacagcctgtgtctgccttagtttctccatcctgcaggatatattgcctgggaggcaggctgcccagttctgagtagtcagtctttggcctgactccacggagcctcattaatctcccattaatcacattaataagcagttggcctcctctcctcttcccacctattccagccctgcccagggcttagggacaagtcacaccaagtaaggagaggaacccacatgtccagttctctagtcctctcatgagcccaaatgccctgagggcctggcctcctgccctcaggtcctggacctctctatggcctttgcctgcccccacttccctcagaaaggcatcctccggccctggcttccactccatccaggcggagtggaaacatttattgattgcctactgtgtgccagacactgtcctaggctctgatgacacagcagggatccaaggtgcttactttccatggagacccacagtgggcagaaaggggttgtgacttctctgtgctagagacccagggagtctgtcctcccctactccagccccaggcactgtcactggggagacaagggagtctctgagctaatgcttgctttaggcaggaagtgaggaagggaagggggagctctggggtgctcctaaaaatgagatgtctgcatttctgtataggagtgaatggggacttcgagacaaagagacagccgctgagctgaggtgggagggaagaggtagagtgaaagcagaagcccctgtacaccgagcatctcttggccaaagatcttggcctcggtccttctgggtggcctgacctgtctgtgtccctggtgaggggtgtgacatatgtccctgtggttctgtgtcttgtctctgtcactgcctctgcactctccacatattgttgtatgacctctgaacatcatgaagcacctttctctgcagcgagggtcattcgagggctttctctcgcctttgctctttcacctgatcctcgcggacagctccgcccaaggtggcaagaatgaccatgtgtgaataaggggtgtggaagctgggctgatgcgggagaggtgggagggtgcgcgtgaagctggacacagatcagaacgtgaaccccaccccatcctgctcccagccagagctcagtccttctagaactgagccatctgctccccacttccccagagccctggaggcgccaccctcacttccctccactggggctggctcaggtgcctgctcctttctggttcctctgccctgcccccagatcccacccctcggcaggcacccaggtgcctggctccatgacgcagcagctgcggtctcctcttatcagggctcccctgtgggttggggtggctccatttgtttaagacttagtcctgaggagccccagcccccatgacgtcaagattggctccatataaggtgaggggtccgcagcccatggtccccaagcagccacccagctccgacatggcccagccggtccacagcctctgctccgcctttggcctccagtgctgcctcctcttccttctagcttcttggggggcaggtaagatgcccacaggggatacagaagacagaaacagcttgtttcttagtgttcatagcgttggacaacaaatagaaatgaatgaagggggcgggcacggggctgctacagacagttgtctagagtgttctctgctcaagtttgctggctaagggacatgtagtaggagatgaaatccagcctgtgctctgctctttaaaacatggctcacagggctgcacccatccagagggggtttcttcaagtttgcataaagacactgtagaggctgccagccctggatggtgggggtaggcacctgacattcattgagcaccgtgcacggaattcacagctgctcatggtgatttctttcttcttcttcttcttcttcttcttttttttttttttttttttgagaaggagtcttgctctgttgcctaggctggagtgcagtggcacaatcttggctcactgcagcctctgcctcccgggttcaagcgattcttctgcctcagtctcctgggtaactgggattacaggcacctgccaccacgcctggctcatttttttgtatttttagtagagacaggatttcaccatgttggccaggctggtctcaaatgcctggcctcaagtgatccgcctgcctcggcctcccaaagtgctggtattacaagtgagagccaccgtgcccagagactcatctcatttcatctcagcatcccctgaggtggctaataatatcccatcttatagttgaggagagtggattcacaatgattatgtcccatatctcacagctagagggaggtaagcagggattccagctccactgcccccagccctggggggacaggtggagcttctctcctgagagctctgttttgtgcagacctagcttccagtcctgactctgacccatttgcctactctggccttccacaccatctgtaaaatgggctggatgctgctgcccagccgtaccagtatttgatgcctacagagcatttacactgcaccaggtgttgctctagggacttcatccacatttactcatttaatccacatggagactcagaaaagtgtgcgtcaaaggctctgtccctgtcttacagttgggaaacatctcaggactttgatgggaaaatgactatggacaagttcgacgaacaaaacataccctaaagataagatgaaattatgaaattagttcacttagtcaagaaacggactgctactgaacccggggagcagagatgctgaacacaggggcggtgtggagggcctgggcaatttggaggagggtctccacaaggcagatgtagaacagcagattcagagacactatctacccactggacagtcatccaaggacagagccatccacagggtgatattagaggcagtgccccttccctgagcacagtcaggttgaggccaggggtggaggcaggggcaggtgggtggtgaatggcgatgactgaggaatctttgagctgcctctgaaaggtctcagcagtgcgtcctgtctgtgccctgacttgatgtctgtctcccctaccttgagggtctggagacagaggtaccacagctgcccaacacctcccggccccatctctcccgcctttccttccccttcctctcaggcggattgtccactggctgctctctcctccttccatcttgcagcttaaggaagaggaacctgcagggggcggaagggaatccactccatacacagtcgctctgagatttgcttcagggcggagatctgaattcctgagattccgatggggccatgtgggcgtggtctcggagaggagataggcgtggctgggcggcatggagggaggggtggggaggacaaggggagctggctgctcccattctgcagattttgaagacaagagtgagtgggttacaggtggggagggcttgaggctgggctcgggttgtgatgaggtcgggtggaactggagtgtgaatcagagctggtgcatggctgtgcccagcagagagagaggccagggcaggaagggaagagggacaactgggatggatgaagccctttagtctaccattctggtgaggagaccctgacgtttgtccacaggaccagtcaacacccagacagataactagatcctggaaccccagagtctgcatcatgcagtcacagaaccacaggtacaatctagattaaatcatccgagggcagcacaggtgcagtccagattaaatcatcacagagaggcataggtgcagtccagattaagtcaccagagggaggcacaggtgcagtctagattaaagcatctgagggagcacaggtgcagtctagattaaatcatctgagggagcacaggtgcagtctagattaaattatcacagggaggcacaggtgcagtccagattaaatcatcacagggaggctcaagcgcagtctagattaaatcatctgagggaggctcaagtgcagtctagatgaaatcatctgagggagcacaggtgcagcccagatgaaatcatctgagggagcacaggtgcagtctagatgaaaccatctgagagagtacaggtgaggcaggagatgggaattggggctggggtccttggaagaatctaacaagaacattttcctataacaaatgttatttgatttaatttctataacacaaataatgtatgctcattgtagaaaatggaaaatagaaaaaataagaaagaaaaataaaatctctgtatactccctagtccccaagcaatcatttgattatatctccctttagctttccttttttttttttgtagagacaggtctcgctatgttgcccagactggtctcaaactggtgatcctcctgcctcagactccctaaatgctaggattataggtgtgaacaactgtgcccaccagcttttctttttctatgtctgcattttaagccacttattgaactcatactgtataggtattttaacaaacatttacccacattattgcaaatggagcatgccatttatgggggtaaggataccaggaaacactagagatgctcttttgggacagcgtgccctgacagcgactccaaggcatgagttgcttagcaagatattctttctcccttccttccttccctttcctttcctttcccttccttccttccttttctttcttttcttccttttctttccctttctctttctttctttctctgtctctctttctttcttctttcgacagagtctcactctgtggcccaggttggagtgtagtggcatgatcttggctcactgcagcctctgcctcccaggttcaactgattctcctgcctcagcctcctgagtagctgggattacagggtcctgccaacacgcctggctaattttcatatttttagtagagacggggtttcgccatgttggccaggctggtctcgaactcctgacctcaggcccacaatggcctcccaaagtgttgggattgcaggtataaggcactgtgcccagccgatgtcctctctttcaaatgagtgaacaaagcagatggcggggacctttggcactgtgcatcgttttgatgttgtgggatttgttcttattcttttatcccagctgagcatccacctacagtgtcttgtgctaaagttggattttcctctctgcacctcctgcctattcttcagtgaccaaaacagttcttttcgggctatgatggttgtacgtggaatgaatatctcctggtgaaaacttactagggaaataagtcactaccaaagtagatcgtctggggcagagatgctcctcttgtcctgggggtttacactgatttgcctcttggctgtgtcagggccaaggaatcccttgagctttacctcagctttttacaatctatggttccacaactgtttgatgcagatctaaaattctaaaatcttgttatctgagtctagttatggactgtgatcctgtggtttaatgacaactggtatcccagaattggtgggccagaggccttctttcaacgtcttttaatctcagagctcaattactgaacagcggaagtcgcccttggtcttccagcctgtggaggtcacaaatacatttggtttttacttaacgtgcatgatgaaatgttgttggcaaggcttttaaggagttttcatcagtcttattctttcattcattattcaacaaatatttacaaagtgcctcctatggatcagacactgttctaggctggagacagcgatgaacaaaacaataaaaatccctgccaggccaggccaggccaggccaggccaggtgcagtggctcacgcctataatcctaatattttaggaggctgagatgagaggatcactgaagaccagagtttgagaccagcctggccaacatagtgagaccctgcgtcttaaaaaaaaaaaaaaaaaaaaggtgaggagggggcatactggctcacatttgtagtcccagctgacagggaggctgaggtgggggtactgcttgagcccaggaggtcaggactgcagtgagctgtgaccatgccactgcactccagcctggtgcagagtaagactctatctcaaacaacaacaacaacaacaaaaaccccggccggatgcaatggctcatgcctgtaatcccagcactttgggaggctgaggtgggcagatcatgaggtcaggagatcgagaccatcctggctaacacagtgaaaccccatctctactaaaaatacaaaaaattagctgggtgtggtggcatgtgcctgtagtcccagctactcaggaggctgaagcaggaaaatcacttgaacccaggaggtggaggttgcagtgagcccagatcgcaccactgcactccagccttggcgacagagtgagactccatctcaaaaaacaaacaaacaaaaaaagccttgccattgtggaaatttaattgtatttatcacatatcagaaagtgatgagtgctgtgttattaaaacacagcagagaaagtggcccaggaatgcagaggctgctgttttcaagaaggtggccacagcaggtgagaggtggatggagcaggcaggggggtagggctactgctcaggctccccttactaccaggagaaggacagggcaaagcacgagattatttcagagactacaatgtggattcaacaaacatttaaatagcttctgtgctccagagtcttccatggtccatacttcctttaatcctcacattaagctggtgcagtcagcatcatggttatttacagtcgagaacatggagcttcagagcacttaagagacctgagcaagaatgcaaaaccgctgagggaccgagcctggatgtcaaacctgtcctctgattctttaaggccagtggaaaatgccctttgcattgctgccagctcctttattcactcaatagatagtcattcatcccttatcatgtttaaaaacatctggggcacagtgaaaagtctaattttgccaattacttaacctctttgcgtctcctttccccacctgtaaaacagtaagatcacactcctcacttcacaggttcataattatttgattaaataaacaaatatatgaacagcacctttcagggagtccacacatgtcagtgtctttccttctttaaaagactgggctgacctattggctgtgcactgtggtcttaaccagcaatgatctgggcccgggaccccaggatgtgtgttcagattctgtctcgacctcttacttgctgggtgtccttgagaagattacttaaccactcagaaccttgtttcttcatctataaagtttggagaataggatagttctcaacctcaacaggttcttgtgaaaagtaaataagttaatgtatgccctcacttgtagaacctgcctgtctcattgtagagctctagaaacgttgcccattgctattgttgtgggactatgtacaggtcacttttcctccgtgaaatgtaaatttctcagatgtaaaataggggaagttgaccgcttctaaagagccttatggagcattgggagatcaatcaccatagaagagaatccagaaagagaatgtctgtgaggccaccagccacatcctggggccggggaaggtgtccaataaacaatagctattactggtattgctgccaaggagatcaggtaatgggattgggacagtggagtgcaggcctgatcattcagcccccttctctcccctcattctcaattcctttcagagacttgggcttctctattaccctcacacccttcttgtcctgcccatatttctttcaaggactaagctccccaggccgattctgcccatcagcaggcaggtggactgtggtttcttgtgattgggaataggtccaggttccggttgccgccttgagctaacagggaccagaaacctcagttatgtaatgacactatctctttcactctttggtgatctcttggccttcactcttttggctaggtatcagagacatctcctctgtctccatcaggttgtttttccatggaattaaggcgtgtatctgtccactgataggggtgttttctctcacaccctgtccttaaacatagtcagtccctaccacaatctagttgcctcgtttactcctgtcaggacccccaagcagatatcttttcctttcaggatggcccctttcatctatccccagttggctttaaatgtgtgaagagggggacccagtggggtgaccataagggttgggtcatctcatccattcccctcatccaactttatcaccgaaatgaaagcttcccatctccttactctacccatcctccattcttcttatacatctctcactcacaatttgtgtctacctgctaatccctatgggaagttctgccagaggtcttacctcaatttctcacactgttacatttgggatggtgttagaatgttatggaaaggtgaagagtctaacgtttactcctggtcttctcagctatgccatagaaagaagactccattccataagttacagaccctaaaggggcacctgcacagtaaaatgctagtccatacatgccctcaaaaccttaccattggataggcatggcagggagtggaggtcggcaggcacgcaaacaactgtaacgtgaagttgaaggtaacaggacagaatggtgaataaagaccttttcaagcactgaaatgaagctggattttatctgcttagacggatcagaaaagatgccttaaagccagaaggccttgagatggagagttgaggagatgtggaaggggatgaggtggcatgcttgctgaaggcacagcctgagcctaggggctggaggtgagaatggggaatagatatcatagtattcagaggagactggctggggagtcatatcagggggaacaaagagatcccctagagaaggaggtgggaagggggagttggagaagaacatgggggaagtttcttatttgcctctctccctccacaggtgctactacattccaagaatatcagaaaactggggaactctcaacatccgatcacatatttcccctcactccaggccttgtttatagtatcccttttgatcacattgttctgcattcaggacaaagacctccagagctccctaaatctacagaaatccatgagcaaaaacgccactgcaacaccacacgccattctaagccaactgacaagcctacaggcaactccaaaactatagaccacaaaagctctacagataatcatgaggctcctcccacttctgaagaaaactccagcaaccaagggaaagacccaatgatccggaaccagcgctctgttgatcctgctgactccactaccacacataaagaatccgctggaaaaaaacatataacgccagcacccaagagcaaaataaactgtcgtaagtccacaacaggcaaatcaacggtaacaagaaaatcagataaaactggaagacctttggaaaagtccatgagtactttggataagacaagtaccagctcacataagactacaacttccttccacaactcaggcaattcacagaccaagcaaaaaagcacatcttttccagaaaaaatcacagcagcctcaaaaacaacatacaagaccacaggaaccccagaagagtcagaaaaaactgaagattccagaacaacagttgcctcagacaagctcctgacaaaaactacaaaaaacatacaagagaccatatcagccaatgagctcacacaatctctagcagagcctacagaacatggaggaaggacagccaatgagaacaacacaccatccccagcagagcctacagaaaatagagaaaggacagccaatgagaacaccacactatccccagcagagcctacagaaaatagagaaaggacagccaatgagaacaccgcaccattcccagcagggcctacagaaaatagagaaatgacagccaatgagaataccacactattcccagcagagcctacagaacatggagaaaggacagccaatgagaacaccacaccatccccagcagagcctacagaacatggagaaaggacagccaatgagaacactacaccatccccagcagagcctacagaacatggagaaaggaccccatttgccaatgacaaaaccacatcatcctcagcagagtctacagaacatggagaaaggaccccactggccaacgagaacaccacaccatccccagcagagcctacagaaaatagagaaaggacagccaatgagaacaccacaccatccccagcagggcctacagaaaacagagaaacgacagccaacgagaagaccacactatccccagtagagcctacagaaaatagagaaacaacagccaatgagaagaccacaccatccccagcagagcctacagaaaatggacaaaggaccccatttgccaatgagaaaaccacatcatcctcagcagagcctacagaacacggagaaaggaccccactggccaatgagaacaccacaccatccccagcagagcctacagaaaatagagaaaggacagccaatgagaagaccacaccatccccagcagagcctacagaaaatggagacaggactcctttggccaatgagaagaccacgccatctctagcagagcctacagaaaatggacaaaggaccccatttgccaatgagaagaccacatcatcctcagcagagcctacagaacacgaagaaaggactccactggccaatgagaacaccacaccatccccggcagagcctacagaaaatagagaaaggacagccaatgagaacaccacaccatccccagcagggcctacagaaaatagagaaatgacagccaacgagaagaccacactattcccagcagagcctacagaaaatagagaaaggacagccaatgagaagaccacatcatccccagcagagcctacagaaaatggacaaaggaccccatttgccaatgagaaaaccacatcatccccagcagagcctacagaacacggagaaaggaccccactggccaatgagaacaccacactatccccagcagagcctacagaaaatagagaaaggacagccaatgagaagaccacaccattcccagcagagcctacagaaaatagagaaaggacagccaatgagaacaccacaccatccccagcacagcctacagaaaatggagacaggactccattggccaatgagaagaccacaccatctctagcagagcctacagaaaatggaaaaaggaccccatttgccaatgagaagaccacatcatcctcagcagagcctacagaacacgcagaaaggactccactggccaatgagaacaccacatcatccccagcagagcctacagaaaatagagaaaggacagccaatgagaagaccacacaattcccagcagagcctacagaaaatagagaaagcacagccaatgagaagaccacaccattcccagcagagcctacagaaaatagagaatggacagccaatgagaacaccacactatccccagcagagcctacagaacatgaagaaatgaccccattggccaatgagaagaccacactatccccagcagagcctacagaaaatggagaaaggaccccatttaccaatgagaagaccacaccatcctcagcagagcctacagaacatggagaaaggaccccactggccaatgagatcaccacaccatcccgagcagagcctacagaacatggagaaaggatagccaatgagaaggccacaccatccccagcaaagcctacagaacatggagaaacgacagtcaatgaggacaccacaccatcctcagcagagcctacagaaaatggagaaaggaccccactggccaatgagaacaccacaacatccccaacagagtctacagaacatggagaaaggacagccaatgagaagaccacaccatccccagcagagcctacagaacatggagaaaggacaccatcagccaatgagaagaccataccatctccagcaaagcctacagaacacgaagaaatgaccccatcggccaatgagaacaccacaccatccccagtaaagcctacagaacatggagaaaagactacattggccaatgagaagatcacactatccccagaagggcctacagaacatggagcaaaaactacgtcggccaatgagaagatcacaccatccctagcaaagcctacagaacatggagaaaggaccacatcacccaatgacaagatcacctcatctgcagcagagtctacagaacatagagatagggctacatcagccaatgtgatcacaccagccccagcagagcctataaaacatgcaaaaaggaccacattggcccatgagaagatgacacaagtcacagaaaagtccacagaacacccagaaaagaccacgtcaaccacagagaaaaccacaagaaccccagaaaagcctacgctatactcagagaagaccatatgcaccaaagggaaaaacacaccagtcccagaaaagcctacagaaaacctggggaacaccacactgaccactgagaccataaaagccccagtaaagtccacagaaaacccagaaaaaacagcagcagtcacaaagactataaaaccttcagtcaaggtcacaggagacaaatctctcactactacctcttctcatctaaataaaactgaagttactcatcaggtgcccactggttctttcaccctcattacatctagaacgaagctgagttctatcacatcagaagccacaggaaacgagagccatccatacctcaataaagatggctcacagaaaggtatccacgctggacagatgggagagaatgattcattccctgcatgggccatagttattgtggtcctggtggctgtgattctcctcctggtgttccttggcctgatcttcttggtaagggacagatgtgccccacagaaatcaacctatgggatagggaattgaggatacattaggggtcagagttacagggaataatgagtctaggaaaagagacatggcagaagtgggaggaacagtaatagagggagagttttggtgaaaactaaggagaaagacaataaatacacaggaggtaaaaagctggaattggggacaaggctgtggctgagaatgaaagggtgtgaaagagaaagtgtggggggtggagagtctggggtatgagaataggaggtgtaaagacaaggagaatatggtagagtggggaactggagatggagctgggactcattgtattggacctggagctggaataaacatcaaggtttggatggaatcttgagaatagaatcaagacctgaggtgagtgttgtggaaaacaaatcgcagatggttctcattcctcctttctcatcccaatcacaggtctcctatatgatgcggacacgccgcacactaacccagaacacccagtacaatgatgcagaggatgagggtggccccaattcctacccggtctacctgatggagcagcagaatcttggcatgggccagatcccttccccacggtgatcttggagtaggcgcccagccctggctcttccatgctctgcccctttcctggatgaggaaccggactcacaatttctatttccgggactacaggaagggcagagaatactgacggttaccagtattaacccttcatctgttcttgaaactggttggggaatgaggtgataagcaaggagggtgtaagtttaggggacaaagaagaaagaatgaataatacgagcagacattctctgtagaaggtaatggtctgagaatgaaaaggtgtttgatggacatgttgtgggggcaccaatgcagaacactgcactgagtcctaaaggaaggacaggagccttataggcaatgccccagactgacttgtgagtggggtttatggggaaagggagggactgagggcagagtctctgggtttcaggacagcattatgttatttccattcactattacttaagagtttgtgtgtaaacaggctcatctctgagttctcaggacccttgcccccacccccatttttttaatgaaaaaaaaaaacaaaaaaaacggatccaagaagaaaagagaatttatttccttctccactctctccatgccctggagaaaaaaaagtccagaagaaatcataaatatctctcatctacatggttgcttcctcttcctcccaaatcccttagttttcctaaatgtctacagtggacgccctgttggtttggcttgctgggttgtgggtggacacgcaaggaggggatttttatttggccagcagtctcacccactgatctccaccccagaccttccctgattggtgtctcagcatttattttcctgtctcttccaccaaaagccagctgtagctttatctcgtaaaagttacccatcttctctactgtccccattctctctcctcccaccttcaccccagattcaagttttcctccttgtaggcatttcatctgtgtgtgttttctggattttctctctctcttcttatggccatttcaccttattactgattgggtagagggggaaaaggagaatgatgatgatagtttccttctgtctattgaccttttttataataaagtataacatgtttataaagggcatcatagttattagactatccattgggagaaagttctgactggcgttcctggctctggctgagaccttacagaagtggaggagacagaggagctggagggcaggactggcaatctatggagggtcaagaaaggggaggctgaatttctattgctccaaaaatggctcctttctgggtttaggtaagagccagcctcagtccaggctgggtttatttgcatggtgacaaaatgagtagaaaaacctgtcaattaataagcaagtattttaaagcaactattatatactctgttgaggatataaagaagtataagacatagttctcacctgagacacaaagacaggaaaattaaaattaaataattcaacaagagttgtcacaagttaggtgctatatagaataaaacaacaccctaattcattaagcccaactccgtgagcatctactatgccccctatttatgttaggacaccagccctgctccaaaaccgttgtgtgcccatgtcagtcccaacagaaacctcccatcacccatgcagccttggctctcttaccagagtatggcatcatcactaattgaacaggtgccccagtttgctgccaggctcctaaacgtaactccatccagaatcaaacagcagggccacaggtcactcgctatctgctcctttgggcatccccatttgctgaaagctggaaacctatcatggtcagtaatcccaaccctgacactgatgtcactgaactatctggccctggctgggctgggaaggcccttattactgaatctcccaccagagacccgctctgctaaaggcaagattgaagcttgactctcagaaagcagacatgccagatgccagagggacccagacttaggcccctggagaaaggaggcagagggacacctgggttctggaaggggctggagagccctcgagaaaaggaggaagatgcctggattttagttgtctgggtagacggtgactcagcctgtggcatctgccaggacaggagtgtctctctgccctgggagggatgcagaaacccctaaactcagcctggaccccaattcaaaaacaaaacgaaataaaaacatctctgcctctagagtcctaaacatccaaccggacagacccctcccctatcaagacaccaaaatgcagcactggaggtcaaagggtgtataagggggatggggaggttcttcgcccggcaaaggcggactgtgggccctggggcgcggcgggtgtctccctcccactttcctctctattccccgctaattatcactttgaaatctaggcggaaatcctttaacaagctccggggctgggccctcattagggataattacttaatcagtaggacgggagggaatgcgctcccccagccctcggggagtacacctcggggggagcgagtgccccgagggcaggaggctgccggggcgccggaagctgctgtcccggcggagtcgcagcgggggctccggttccccgagactgcggccctccctcgttcctccaggttccgctttgcgggcggcttctgatctcttgcggacagctcagattagtggctcgaggccgccgcccccgcagcgccccagccctactgcgccgaatcccctcctcccagcccccagcccccagggaggggcctggactgacgggcctgggcgtagctcctacccccgtgacattggccataaaactgacacccgtttgtgctgtgctttcacgtacatcgcacctgtgatcctccgatcaccctgcgagttacgaggcctgctttacaagccttataagaagttacagaccttataagagttcttataaagcttgctttacagatgagaaaaccgaggctcagagaagagccctgttcaaacccacacggctcctatggaacagaaggcttgctttattttctccaagcctcaatttcactttgttcctcagtggagccaggttctctgacaccaaggcagccccacctggacgggtgggatgttacagggaccacctaaggaacagggtgtaattgagatttgcacgagggtgtccagccccttcttccagagtccaggcctccctttccagctccttgaacgtccagagtcttcttctggcctcactgccagtatcccaggtcagggttttttctgccagcctctgtccccggagacacattaactggcctcatagtcacaggctctgcatcctcccctcacagtgcccagctgtccctggagaggtgctggcaaagtaagaagatccaatgatttgggacacagtcaccttcatttttctcccctctgcctcctacaaaggcctctgtcccagaaatgagacatcccagagaaaacaggtttctgctgacctctggctgggagggtgggtctcctctcctcccacagatgtgattcccttgttctctcccgctccctccttcttccctcatattgtcatggccttaagatacccctccctggagagggagcgtccagaagttacggcctcccctgcctggtggcaactataaatgccacagctatggtcaagtgagaaaagaaattaagccagacatattgtgggagcaaccctcagaacccaggaatccagcattcccagtccccactcaccactgtcttggaacctaccccaactgatcttactcctcccagaaccctgcccctggcaagcttttaattcttcctgcaacttcatgtcccattgagacaccaggcatcaaggccccctctggagcccatctgccctctagaacccaggcattctagataacaacttcccacatggattatttcaagatgaggtgagggaaattacctcccacctcctgcatccaggtgatgcttctctttggaatcttgagactggtaagtgaattatccatcaatcggagaagacactgaggccacaaaaagtctgaaggagacaagggttcctgtcccaggcattctgtttgcttttcttattctcattcttttgcaaaagcaaaaagcaagcaaagatgatgaacttcttttttgcccctttctgcaaaagccagtactaaccttaacccccactaaccacgattttgacccccaacttcaccttgcagcaaacccaccttcatcttccccttccaatgctccgctgtaagcatgaacacaaataatagctgtgttgtatttccttagaatcccgggtttaacggctgctcaacaaatgctttgtatctaacttgaaaattctagtttcaatatcatctttaaatatttattagagctaggctccaagtctaaagccaagtgaaatgaaaatatcacttccagaaatactgcctaaattaaaatcctcagtagggctttcataatccccggatagagacagggagggatccttcggatcccagggatacgggaactgtgggtgatattagcctgaagagaagtacaatccaaattcctgtcttcctagccatttcacctgacttctctccacctgacttctctccttggtcccttcaatgtttcaagtttctctgcctaatgactacaacccaatgtcaggcagatttataaagccccttcgcttccactgtaggatggaatgccataaaaagggagcaaggagacagttgtggaattggaataaacagaaacagccctaggctgaatgaacaggaggctgctttgtggtggcttctttgatgtctgtttcctgcatcctctctctgctctcttatcccaggcactctcctggagaccctgccttgcacatcctgttcttttcctcctccctgcgtctctgtgagcttgttcattttaagaggcccaaattattactgcaacaggcaacttccaaactcatattaagtctaccttggctctgaaatccagtcctttattttcaattttttttcaataatatcttcacttggatgtcacatcatatcaaacgtgacattcacgtgttcatctggcaaacattttttgagcatctactctgtgctagttctgaagataaatcagtgaacaaaacagcaacaggccctgccttcagggagctcacagttcactaggaaaggcagagatcacacaaagaaggcatataataaaagagaggcacaagtgtgcaaaatactgtcaggacccacctcgtcttcccaccatcaagtctaaaaagccgccttcatcagcatccattctcccctgctaacattggagtgttcgtgcatcttggctctggctcccccatcccacacctcctgccttcttcatgggcttcttccccttccagtttttccttctccttctacagggtccttcccaacaccagccaaataagccctaagcagtgtgcacaggaagcacccagaggagagtatttttaaaaagtagatttctaaagacccggcacggtggctcatgcgtataatcccagcactttgggaggctgaggtgggcggatcacgccaggagtttgagaccagcctggacaacatagcgaaaccccgtctctactaaaaatacaaaacttagccaggtgtggtggtgcacacctgtaatctcagctacttgggaggctgaggcaggggaatcacttgaacctgggaggcagaggttgcagtgagctgagatcacaccagtgcaccccagcctgggtgacagaatgagatgctgtctcaaaaaaataaaaaataaataaataaaatggagatggccactggatgcagtggttcaggcctgtaatcccagcacttttggaagacaaggtgggaggattgcccaaagctaggagtcagagacctgcctgggcgacattgcgagacactgtctctattaaaaaaaaaaaaaaaaaaattaacaagttccccaggcactcctgatgtggtccagggacacactttggaaagctctgctctgctggcagccatcttcacagacccccacccacatcttctcagccttgcccccatcagctccccttcatcaccaagcctcttgaaacaatcccctacaaacactatcttcatgtccttatctcctactctctgtgtgtatgtattttctctgcaagttttaccagagcaatccatgtaaatagtttaaagagtccaatagttccatagatttattgcaaaaactagcacggatgcaccctcccccttttcatgtccaattcctgttctccagaggagacgacttttaacttttagctttttatcccagtatttgcaagtgcagatttaaacatcatgcccatattgtattgcaattcatagattttttttaatgagaccttaaattgcgtcttttattggactaaagaatattgtaagtctcaaaatagcttcctgtcccaatctcacctctgaaaggacttactaatttaaatatatctactatgaactgaacagtgtcccccctaaatatgtttaagtcttttttctattttttttttgagacaggggcttgctctgtcatccaagctggagtgtagtggcacaatcatagcttgctgcagccttgacctcctgggctcaagcgagcctcccatctcagcactcacccctcccagaggctgccaccatgcccagctaattagttttgttttaaattttagtagagaccatatctcactatgttgcccaggctggtcttgaacccctgagctcaagtgatcctcctgccttggcctcccaaagtgctgggattataggcatgagccaccgtgcccggctcatatgttgaagtcttaatcatcaatgtgactatatctgaagatagggtctttaggaagtaattaaagttaatggggtcataagagtggtgcccgaattcaatgggactgtggccttatcaaaggagaaagagagttctttctgtcttcactatgtgaggacacagcaagaaggcagccatctgcaatccagaaaggagccctgacaaggaaccaagttgtccagtaccttaaccttggacttcccagccttcagaactgtgagaagacaaattaccattgtttaagccacccagtttgtggtatttgctatagcagtccaaggtgattaagacagtatccaatatcatggagggataaattttcttttcaaaacaaaactaaaaatattttttaattctaatttttaaaaatcagtaaacttcattttagcagtaatcataaaataaaatgcaaaggaaattctctaagttacatgactcgagagaaaatatccatatctattgtttctgttgtttaaaacataatttatctagaatttggctcataagttttaaaacaaactgtatgaaaatatgacagtgcatttactgttaactcctgcttatgttttagaaagctcttatggaaagaaaaaaaaaatgctttccaggtagcagacacagataggttatttggggaattgataactaaaaattagagtcttattttttattttttatttttttgagacggagtcttgttctgttgcccaggctggagtgcagtggtgcgatcttggctcactgcaacctctgcctcccaggttcaggcaattcttctgcctcagcctcccgagtagctgggattacaggcatgcaccaccacacctggctaattttttttatttttagtagagacggggtttcaccatgttggccaggctgatcttgaactcctgacctcaggtgatccaccgacctcggcctcccaaagttctgggattataggcatgagccaccatgcccagccttagaggctttattagcattcaaaaccatggatgcaatgaagtgtggagtactcttaaacaagctccaagtccatgaaatgccgtgtcagaatttttcctttcctttttgcatagcaaagtacttgcacaatcccaaatatttgtcttcctgagcagcagctacaaagatgatgccaccaggcttggccagggtagctgctgattttcccttcttcctcctcctcttctcctcctcctttttcttctaattcttcctcctcttcctcttctctctccctctctgctttctcctccgccttcttattttcttaaccatgataaaatatacataacttacaatacatcattttagccatttataagagtaaagtttagtatcattaagtacattcatgtggttgtgcaaccatccctggtaatttcttcttgattctctgtcccggaactactaaactcaggctgggtttagcataatcgttgcctgtgtacttgaaaagtggagagttgctgacctctgatgggtagcttggtcttgctgggcaaacccttctggaagctgttctagcacagctcagccaccacttgcacggactcctgctgtgctggagctctcctgacacagctttcccagctgcacagtcgttgctatgtagaggaactaatacttgagcgactattttcttatagttggataactctgtttccttataaatatttttctttataaatagagagtgctgtcccatcaatcctgcatccttatactagcagtcctgaggcttttcctaactgttcagctgcctgttgaggcattccacatttttaaatgcattgctgtttgttggtataaccgtacagccttttctgggtctacattttctctgagctttccagcttgctccaatgcctctgaggttgctgtgtcagtgctgctgttttttagatccatcaaaggctgggatttctgcatttccttcaacattgtgtcaactaggttgggcgcggtggcttacgcttgtaatcccagcacttcgggagactgaggtgggcggatcacttgaggtcaggagttcatggctaacatggtgaaaccatctctactaaaaatataaaagttagccgggcgtggtgacgtgtgcctgtagtcccagctactcaggaggctgaggcaggagaatcactcaaacccaggaggcggaggttgcagtgagccgagatcacaccactgcactccagcctgggcaaaaagagtgaaactccatttaaaaaaacaaaacaaaacaaaacaaaaacaagaaaacattgtggcaatttgctcagaagcgctacttttccatattcagaagggcactgtcacagtacggcttccattttgaaaaaccagtctgcaggtatttctttgctttgggcctctcatttcttttttggtcctgcacatggtcctgcatggaggacaggagggacttttccttttggcccctgaaagagtcccagtcagctatgcataggtttttcatttcggacatcatccatttacttattcatggtctctctcccttatttgaatataagctctgtatcaacttttcaatcactgtatcccatgcctggcacatcatgtggcccacagaaggttcttaaggaatatgtttgaataaatgaatgagaaggcctggatgcagagagtgtatatcagagagaaacccagactaatcccccagattcttctctaatccattcccagtgctaccacttaatctagtatgttatactagaagagtaaataaatgaaagtaagaaagacaggaaggaaggagggaaagaaggaaggaagggagggagggaggaagaaggaaggaaggaagtaaagaagggaggaaggaattaaagaagaaaggaaggaagagaaagaaagaaaaagaaagagagagaaagaaagaaagaaggaaagagagagagagagagagagagggaggggggaggggaggggaggggaaaggaggggaggggaagaaatcttcccaaggacttttccccctagtatctccttgtgtctctttacaaactgcctaactcatcaactttcaccacctgaagaggctggaaaaaagctggcctcctgtgaattttacaccccggtgctctcagatggtggatgagaacctgcaggctcccttcaggcagggatcgtgtgctgaacgtcccaaagagtgatgggggacttgcaccagagtgtctctgctcaagctgccctcctatgacctccttgtcacttccacccagacaaggggattcttctgatcagtccagatgacctggatgaagttttctttctttctttctttttttttttttttgagacagagttttgctcttgttgcccaggctggagtgcaatggcacgatctcggctcactgcaacctctgcctcctgggttcacgcaattctcttccctcagcatcctgagtagctgggattacaggcatgcaccaccacacctggctaattttgtatttttagtagagacggggtttctccatgttggtcaggctggtctcgaactcccaacctcaggtgatctgcccgccttggcctcccaaagtgttgggattacaggcgtgagccactgtgcctggccctggatgaggttttcaaacaacacactttcccctaatctgatgagacccaactatccttagtgttataacacacacagagataatgtggagcctccttaacataggttagattttatttcacctaggcaagtacagttccaaaaaacattatggcagaaaggacaaggtgccaagaagatcgatcaaatgactcatgcactacagaagcacagctgaatcagcaaccgggcccttagctgcggaggaaactgcaaatgctgagcctctgaaatacatgattccaaataaaaggtaacgacaccagcagttctgctgatgtaaaggaaacaagaaagacatatgcacgatgctcctaattaaatatcaaaaatgtaaagtaggtgtcgtatttgactaaaaattgatatttttcaggaaggactatgcccccagggcccactgtagcctttgagaccatggtggagtctgtgtccacaatggcctcaaccacaggctctgagagtacctcaacctctgagatcatcgccatctccaccatggactctgagacctccataggctcagaagccaccacaactattgttgcagcctctgaggttaccacaccctccaccacagcatctgtgccactgtggcctcaaccaccggctctgagagcagcacggcctctgagatcatcacgtcctctacaatgtctgtgtcagccacagcctccagcacagcctccagcacagcctctgagatcaccatgagctctgcagccatcccagtctcctccacagcttatgagaccatcaggttctccactgcagtgtctgagccagtgacagcctctatcctggcccttgagtccaccctggccttcaccacggtctctaacaccaccacatcttccacagtaacacctgtgcccaccacagcttccacctcaggctctaagaacacaacagcctgtgaggccaccatgtctgaaactaccattgctgccatcacagcctccgaggacaccacagtctccactcaaacctctgtgatagctgcagagtctgtgccccacacagccaccaaaacacctactgacaccaccacagcatctgtgtccgccacagtccccaagaacaacacaccctctgtgataacatctacaccttccacagctcccaacacagcctctaaaaccatgaccacagcttccaagaccgccacgacctctacgataacatctctgcccaccacagtcttcaccacaacctctaaaatcaccgcaggctctgagatccccacagcctccaccacagactctgcgaccactgcaatctccacaaaagcctctgggacaactgtagagtctgcgccctctacagcccctccaacacctgctgagaccaccacagcatctgtgcccaccacaacctctaccacaggctctgagaacaccggacaccacacagtatcatctgtgcccaccacagtcttcgctacagcctctgaaagcagcacaggctctgagaccaccagagcttccacctctgccactgaagtgactacagccatgaccacagccatgaccacaggttctgagactgctgtggtctccaccaaagctcctgtgacaaccacacagtctgggttctccacagccaccgtaatgcctgctaagaccactacagcgtctgtgtccaccacagcctccaccacactctatcagaatactatagactccgtgaccaagtctgtgcccaccatggactctaccatagcctccaagagcaccactctctccaagatagtatctgtgcctactgcagtctttatcaaagcgcctgaaaccaccacaggctctgagatcactctggcttccatcataacctcaggaaccactgcagtctgtgactacattggcctctagcaaagattccgagatccccacagcctggatgataacctctgtgcctactgtagctcccacctcagcctctgaaactactgaggccttctccacagcctctgagtccaccacatcctctttcaaaatatttgtgtccaccacatcctagcctccactatggcctttgaggccacatcaacctctgagacccccactacctccacaatagtatctgtgcccacaacaacctccaaaataacctctgagaacactgcaggatttttatccatgatgggctctgagaccaccacagcctccactacaagatctgagaccactacagccactgaaacctccacggcttccctcacagattctgagacccccagtgcctccataatagtatctatgcccacaaccgcctcctccacagactctgagaccaccacagcctccactgcaatatccacgagcaacatggctgtgagcacagcctctgaggtcacttcagggtctggaagcagcatggcttccaccacaggctctgaggccaccatgccatccacagcagtatctgtgacctccacagccttcgctttggcctcatcgcccttcttggcctctaccacagcctctggggccactgcaacctccaccactgtctctgccactttcgtgcccaacaaggtcactgacatttctactcagaccatcaccaaaacagttgtgtcaggtactaacccccatgtcttctctgatcacacacattttaattccaatggcaaccactagctcttcacctgtttctatcatctctgccctgtctcaagtcaagcctgtacactgttaggtatcatttcctggagggcccctagaggcgaggttgagagtgtgacccatgaggagatgtactacactcgaaaagaactgcttgaattttctaatttatataaacagaaatctggagaacaggcattagaatggatatgaagggtgtgggataatggtggaaggaacatagagttaggtcaggctgaatttattgatttggccccactaaatagggactctgcatttaatgttgcagcttggggagttaaaaagggttctaatagtttatttgcttagttagctaaaatatggattaaaagatggcccactgtgagcaagctgatctcccttggtttaatgtaaatgaagggatccaaaggcttagggagattgggatggtggagtggattagtcaatttagacctactcatcccagctgggagggtccagaagatatacccttgatgatgctttgcaaaatacatttgtgagggcagcacctgcatatctgaagagccctataattgctcttctctgtatgtcagatctaacagtgggaaccgccgtcagtcaactgcaaaatttaaatacaatgggaataattggatccagaggtggcaggggccaagtggtagcactcaaacatcgaaggcaatgtgggtgtaggtaccataatggacagcagaggcaaagtggcaatcagaatagtccaactcatgcagagctctggcattggctaattaatcacagtgttcctagaagtgaaattgataggaagcctattgcattcctatttaatttatacaagcagagaacttctaggctgaatggacaaaagactaatttgaattataaaaacagaatcacggcccctcaaccaatttccagacttgagccagttcacagacccagatccccttgaatgaacgggaggccgggtccccttgaggaaggaccccactacattaccaacaatttgtgcagtgaatctttctcccatccttccccaagacctctggccttttaccagggtaactgtgtattggggaaagggaaatgattagacattttggggactactggacactggctctgagctggcgttgattccaggagacccaaaatgtcattgtggccctccagttaaagtatgggcttatgagtccgggagtggtggttcatgcctgtaatcccagcattttggaaggccaaggcaggtggatcacgaggtcaggagttcgagaccagcctggccaaaatagtgaaaccctctctactaaaaatacaaaaattagccacgtatggtggtgcacgcctgtagtcccagctacttgggaggctgaggcaggagaatagcttgaacctgggaagtggaggttgtggtgagccaagatctgccactgcactccagcctgagcaacagagtgagactccgtctcaaaaaaaaaaaaaaaaaaaaaaaaagtaggcgtttatagaagtcaggtaattaatggagttttagcccaggtctgacttatagtgggtcccgtgggtccctggactcatcctgtgatcatttcctcagtgccagaatgcataattggcatatacttagcagctggcagaacccctgcattggctccatgactggtagggtgagggttactatggtggaaaaggctgaatggaagccattagagctgcctctacctagaaaaatagtaaataaaaaaaaaaatcacatcccaggagggactgcggagattagtgccaccatcaaggacttgaaagacacaggggtggtgattcccaccatatccccattcagttctcccatttggcctgtgcagaagacagatgaatcttggagaaggacagtggattatcgtaagcctaaccaagtggtgattccaattacagttgctgtacccgatgttgtttcattgcttgagcaaattaactcatctcctggtacctagtatgcagccattgacttggcaaatgcctttttctccattcctgtccataggcccaccagaagtaatttgccttccgctggcaaggccagcaatacagctttactgtcctgtctcaggggtatatcaactctccggctttgtgtcataatcttattcagagagagcttgatcactttttgcttctgcaagatatcatactggtccattacattgatgatattatgctgattgggtccagtgagcaagaagtagcaaacacactggacttattggtgagatatttgtgtgccagaggatgggaaataaatctgactaaaattcagggagcttctacctcagtaaaatttctaggggtccagtggtgtggggcctgtcaagatatcccttctaaggtgaagaagttgctacatttggcccctcctacaaccaagaaagaagcacaacgcctagtgggcttacttggattttggaagcaacacattccacatttgagtgtgttactccagctcatttattgagtcacccgaaaggctgacagttttgagtgggatccagaacaggagaaggctctgcaatacgtccaggctgctatgcaagctgctctgccacttgggccatatgacccagcagatccaatggtgcttgaggtgtcagtggcagatagggatgctgtttggagccttcggcaggcccacataagtgaatcacagcagaggcctctaggattttggaacaagtccctgccatcttctgcagataactactctccttttgagagacagctcttggcctattactgggctttggtggaaactgaacatttgactatcagtcatcaagtcaccatgtgacctgaactacctatcatgaactgggtgctttctgatccatctagctataaaatgggtcggtgtgcggcagcattccatcatcaaatataagtgatatacacatgatcgggctcaagcagttcctgaaggcacaagtaagttacatgaggaagtggctcaaatgcccatggtctccactcctgccaccctgctttctcttccccagcttgtaccgatgacctcatggggagttccctatgatcagttgacagaggaagagaagactagggcctggttcacagatggttctgcacaatatggagcactaaccgaaagtgaacagttgcagcactacagcccctctctaggacatccctgaaggacagcggtggagggaaatattctcagtgggcagaacttcaagcagtgcacttggttctgcactttgcatggaaggagaacggtcagatgtgtgattatttactgatgcataatcagtagggggtttggctggatggtcagggacttggaagaagcacgattggaaaattggtgacaaagaaatgtgggaaagagttatgtggatggacctctctgagtggtcaaaaactgtgaagatatttgtatctcatgtgagtgctcaccaacagatgacctcagcagaggaggattttaataatcaagtggatacgatgacccgttctgtggataccattcagcctctttccccagccaaccctgtcatcacccaatgggcccatgagcaaagtggccgtggtgtcagggatggaggttatgaatgggctcagcaacatggacttccattcaccaaggctgacctggctatggccactgctgaatgcccaatttgccagcagcagagaccaacactgagccctcagtatagcaccattcctcaggatgatcagccagctgattactggattactggctggacttctttcatcatgcaaagggcagaggtttgtcctcactggaatagacacttactcctgatatgggtttgcctatcctgcatgcaatgcttctgccaagactaccatcgtgaagtcacagaatgccttatccaccatcatggttccacacagcattacctctggccaaggcattcactttacagctaaagaagggtggcagtgggctcatgctcatggaatttactggtcttatgttccccattatcctaaagcagctggattgatagaacggtggaatggccttttgaagtcacaattacgacatcaactaggtgacaatactttgcagggctggggcaaaattctctagaaggctgtgtatgctctgaatcagtgtccattgtatggtactgtttctcccatagccagcattcctgggtccaggaagcaagggatggaagtggaagtggcaccactcaccatcacccctagtgatccactagcaaaatttttgcttcctgttcctgtgacattacattctgctggcctagaggtcttagctccagagggaggaacgctgccaccaggagacacaacaacaatgccattaaactggaagttaaaattgccacctggacactttgggctccttctacctttacgttaacaggcttagaagggagttacagtgttggctgctgtgactgacctagactatcctgatgaagtcagtctactactccacaacggaggtaaggaaaagtatgcatggaatacttgagatccattagggcgtctcttagcattaccatgccctgtgattaaggtcagtgggaaactacaacagcccaatccaggcaggactacaaatgacccagacccttcagaaatggaagtttgggtcactccaccaggaaaaaaccatgacctgctgagatgcttgctaaagggaaagggaatacagaatgggtagcagaagaaggtagccatcaataccaactatgactgcgtgaccagctgcagaaagagcactgtaattgtcatgagtatttcctccttcttttgttaaaaacacgtttgtacatgtatacacttgtactaagaaaatatcttcattttatttcctttctcctttattatgtgatgtaagatttattgacttcacatcagcatttaagtattattaactttgcgtaatagcatatgggctggggattggtgcgtttccggttgtatgaaggatagttgtattatgttgggcataattatgaccttattattgtctttatttgaagattatgtataatctcaggagatgcgcatgggttcaagttgacaaggggtggacttatgatggttaatactgagtgtcaacctgattggattgaaggacacaaagtattgatcgtgggtgtgtctgcgagggtgttaccaaaggagatgaacatttgagtcagtggcctcagaaaggcagacccacccttaatctgggtggcacaatctaatcagctgccagagtggctagaatttaagcaggcagaaaaatgtgaaaagagagactggcccagcctcccagcctacatcttcctcccgtgctggatgcttcctcagttttggaactcggactggctctcctttctcctcagcctgcagacggcctattgtggggccttgtgatcatgtgagttaatatttaataaactccgctttatatatattccatcagttctgtcgctgtagagaaccctgactaatacacccctcttccaacattggagattacaatttgacatgagatttgggcagggacacaaatccaaatcatatcaccttgctccagtctaagaccaaacaattatgttcattctctggcactttccatcagcaagccggttgcatctgattctatcctcttcgttctgagcaccctcacctctattctggtgactggtgctgtttgggatcctattttcaccacttctgacctaggcacacccattgctatcaaagccaccaccactgcctctgctgtgttgattctcactcgcacctgtctgagcccaccctctcctgtccctgtgagcagccttctccacttgggtcaggtcctcccacatctgcccaagcacactcaccccacctttgctgaccaccacagtgtggtagatgatgtcacctccgtcccagccacggccactggcatgcccatgaatgaatccaattctgtcatctcctcctccagctccctccttacacccagtgatcacagtcacaaaagaagcagggcctgccactttgtatacaagcccgccctcttctatttgggtggccacttccgaagtcaaatagatcttccacttccatacccatcacggtcacgtttcctcaaccttctgcctcctccatcaccaactccaccaggtgacacattctacctcctcctctgtacgacacccacctctattgtgaggacacggccacagaggaatggctttctaccatctctcctcccccaccacccctctcctgagctattctcaccatagacatgttagattcaccccgctctgctctaagcgctcccactcccctttaattatctctgctatgaatgcatcatgttgtgtgacccctggaaccagtcctaccgcccctagctctgtcaccatggcccctggaatggactccatggcctctgctgcagccatcctgtgacgggaatagtctcaaacacctctgacctgggtacatccactatgggagcatcatctaccacctcagcccccagcttcaggaccactacaggatccacccgtgagccaaccagcaacacctcccagtaaacaggcccaatgtccacaggcacaaatacagttagcgtgagccacacatccaaacatgtgatcaaactgagtggacatttacagccccaggccatcatgctcatttccctggctgtagtcatggttggtgttggattgtcagtaggactgaggttttgcctgtgagtgactgagcatggaaatgggcagagctttcctgagaagatagatcacgaggaggattagaattgacggaagaagggccactagactattagcatggagaggggtctggagagtcacttgtaccctagtccaatcgaccaagagtgcaggagcaaatgtatagtcccatgaagtcagatttatcagttagttgcaaaatgggaggctgtataccagggagctgaggagcttctcaccaaacaacggaaatgtcattacagtattgggggaaatgtcattatagtattgggggaaatgtcattatagtattggaggaaagtgtggatttttggtgaaatttaaatgaaagaattttaaaaggctcaaaagaaagcagggctgtttgtaaaggggtcaccggcagcttgaaactgtgaaatagattgtttccttggaaactacagttaaaatgaacgtggaatgttgtattcagagaaaccccttatctgtaccccagttggaattggaggctgcttctctgtgtcaaagtcacttagagtttccagacaagaatgggatatttccttctcactgatttagaatcaaacagcaaatttgtaatagtctgcgattttagagaatgaaatttttcattggctaaatcactgcaagtgagtaggtcactggaagtgagtaagggctgtgatacttcacagctgcagtgcgccctggggaaaaatattcctctcagtgcccctcacagctggccacctatgctgttatgcatctacctcctgatggacagcggccgactgctgctttcgcagtctgatttttactgtctcacatagtgtagtataaagaccagggagaaggagaaagacagaaaatataaacgatagatatagcaggaagaaaaaaagaagaagaagaagaagaagaggccgggcgtggtggctcacacctgtaatcccagcactttgggaagccaaggcaggaggatcacttgaggtcaggagttcgagagaagcctgaccaaaatggtgaaactccatctctactaaaaatacaaaaattagccggtgtggtggtaggcacctgtaatcccaactactcgggaggctgaggcaggagaacttcttgaacccgggagacagaggttgcagtgagccgagatcgcgccactgcactccagcctgggctataagagtgaaactccatctcaaaaaaaaaaagaggaagggggccccaagtgagaggaaagtgtctgggtatgaataggagagcattgagaatatgatggaaaatgtgtcttataaaatagctgggaatgtaacactagaaaaaacatctttggaaagtgatgaacatttaggtcctcaacaggtttttcactttcaagacagacaaaatcataagctccttccagggtgagagtggggcatgtcccacctcatgcctttatgattttacccaagtgaaaacaaattcacttttctaggtacctcttagcacaactcaaataggctagagatttcaaaacttcatgaaacactaagggaagttgacaaagaaatgcccttctggagaatggaggctgtagaaacgctccccctggtgtaggggagggtttgacgttccagaggccccagccctccgcagttcttggtgccaatgtgacagccactggccagcagcagactgtgttctattgtccatcctggtcttaatcttctattcaaatgtatttctcttgttctattttaagaaatagaacatttatattttcccattttggctttatgtattcctgtatgcagtcttgtaaatttgtaggaggagccagagtgagtacacaatacataaatgagaaattcacacaagccacaaacagttaacataatttacaatcaacttacctgagtttcttatttcagagtctctgacccctccctaagggaagaacaatatgtgactcaccagccatgagcaaccccctaaatgtttaagataaagatgtaatattagttaactagcattttattagctatctactaggtatgaggtccagggcccagagtgcttagagggcatcatctctcctttgctctgctcaaccacccttggggatgcgtactcctattatcccattttatagactagaaaactggaagcagagacataagtaacttgctgaagaccacaggacaaggccacgcagagctaggctctaattctggtccgcttgacagcagagcctgtgttcttagccagagtgtttgtttgtttttttgagccgaagcctcaccctgttgcccaggctggagtgcaatggcacaatctcggctcactgcaacctccacctcccgggttcaagcaattctcctgcctcagcctcctgagtagctgggattacaggcatgtgccaccatgcccggctaattttttgtatttttagtagagatggggtgtcaccatgttggccaggctgctctcgaactcctgacctcatcatctgtccacatcggcctcccaaagtgctgggattacaggcgtgaaccaccgcacctggcccacagtgttttttagatagttctccaacctttagctctttatggcctgtctcttatttttctttatctttaaaaattgaggtgtaattcttaccaataaaaaatgataagtatgcaaggcaatagatatgttaatttgatttaataatttcaaaatgtatacatatatcaaaacatcacattgtacaccataagtatatgcaatatttattcaccagctttgaaagtgggaaaaacacaaactgtgtttcctctgctctcacaccaccaccaacacaaaacacttctggtgaccaaattaagaggggaagttcttcccacactaagcaagcaatcagttctgcagcagacaccagctcggtgtcctccgattcagtgctggcactgcctacctggagatagcatcagatccacagactaagcgcgcagtccctcaacaccaaccgctccttcccacaggctgccaagtccaggcctctggaacttctgaccaactggagcaagttggagttggctactcctgtttggtttcgattaatttgcaggagtggctgactgaactcagggaaacacctttactggtttattacaaaggatattacaaaggatacaggtgaagaggcgtggagggagaaggagcagggagcttccatgccctccccagcactccatcctccaggaacctccatatgttttctgagccctggcctttggggtttttacagaggcttcattatgtaggtatacctgattaaaccatggccactggtaatcaacttaaccttcagtcccctctcctccctggaggttaagggttaaggggtggtgctttggtctttccggtgattagcccccatcctgtagccaacagttgactcattcgcatacaaaaaaaaaaatcacttttcagtacctaaggattttaggagctgcatgccaggaaatgtgcagaagtccaaatatatgtttcacgtatcaacttaatacagttgggagaaaggttaaaagttaaattacacttaaaaataaaaagaacagccgggcgcagttctgtaacctcaacactttgggaggctgaggcggatggatcatctgaggtaaggagttcaagaccagcctggccaacatggggaaaccctgtctctactaaaaatacaaaaattagtcgggtatggtggcttatgcatgtaatcccagctattctggaggatgaggcaggagaattgcttgaacctgggaggcagaggttgcagtgagccgagatcgtgctactgcactccagcctgggtagcagagaaagactctgtctcaagaaataaaaaaaaaataaaaagaacaatattaattgaaaaaaataaatactgttcacagatgaaaaaattttgaactataatttacaaaagtacacaaatattatttgtacagcttgattaatttcaaaatgtgttaacacttgtacaaccattacccaacttaaaatgtagaatatttctaccatctgagtagtttattttgtggcccttcccagataatacccactccatcaaaggtaagcactattctagcttctattttatgaactttaaaaaaaatttttcattttaatttttggatggggtctcactctgtcacccaggctggagtccagtggtgccgtcttggctcactgcagcttctgtctacccagagatagagctgggttcaagtgatcctctcgctttggcctcccaaagtactaggattactggcatgagccactgtacctggccttatgaacttttatttatttttacctgacctcatagacatgcaacctttttggttgatttacacaataaaagattccctactcttagctgactctgttcccaggtacaggatgcaaatttaccttgtcttgttttttttatttttgtagagatggggtttcaccatgttgcccaggctggtctctggaatgcctgggctcaagcaatccacctacctcagcctccaaaagttttgggattacaggcacgagccaccatgcccagacttatcttgtcttgaaagttgagcagcatagatccctaccaaggtacaagtatactaattaggaagactgttttctccaataaataaataaataagaggaagagagtcctaaatatcatccacacacacacacacacaggaagacttgatgagaaaatagacaatattgaaaagtgaaaatttatgaattttgataatccaaggtttaatgataagaaagaaaaggagttaactactaatatatatatttttctcttttagaaggatctttctttaccctgacaaatagaggcatttataacctccatgacaacagccttgaccttggtttatacctggactcagtcctgggctctgggacattccacagcctgggaaatgcactcattcatggagggggacttgagatgggacacacaggaacacatggctttggacatggagtgggccatgagctgagccacagccatggagatggctgtggagtgaatcatggtgggcgttatggacttggaggaggctacagcaataatcatgaaatgcatcacagagaaggtcgccaaggcaaaggagagtatagacatagactggataatggaaggtgctatggaaaagaaaatcttggggaagaagggggatcatggaggagaaggtagtgaccataaaatgggtcaggatgggcttctctgaggtctccaagggattggccatagagatggtcatgatcaaaatcaagaaaagaaccagagaaaagagcacagagggtttggccaacgggacagtcagaaaaatagggagtggttctggaggagacctgcagcctcaccagctttgggtgtgagctcaagtgaaaatatcccctgagcataaccatggttccaactcttgtggggaggaggggtcacgatgatcaagctcagaacaatttctctttgatctctcaacacacaagtcagaactctttaggctttggctttctatcgtttcctcaggatggaacctgaccagtaggaggaagaataagattatcacagtttataataatggagtgggtaaaaaatttcccctgagaatttgtaattacacaactttctttatttggatttgtaacttcaaactctacaaactgagtagatcagaaaatcctgttagactcactcagtgccctccagttcttcatctttgggaagagtctccctccctacttctttgcctctttcaaatgctatgtgataagttagaagaaatttactgggacagtgctacaaattaaaatctcaaaatacacctggcatctatgtatttatgtatttatgtttgtcttttttattttccctttgtcctttattattgcatgcttattaagtgccaaacactatgctagtgcctgtaaatacatcaccatttatttctcaaaacaatccaatgacaacttaaacttcttgctatataatggactacgtgccctgactgaaaatacactgtaaagctaagttatggacttcaaaatcttcttaaaagagtcagtgaattggcatgaaagtatggaatgctaaaattaaagactaaataggacccaggaggtaagggaagtactgaagccaacttttgcaaaacccaaagaacttaagcttcgggtattacagcttcagctggatcagcccaaggtcatgggtggggaggaatcacataaatctgtaactttcagtgagaatgtaaactaaaaataaacctgcccctcctctaaggaaatgtaagcaaaattgcctgtctctaaatttggtgcagaggagggtagagggagtatcccttgagaaataaattgtaaccacaacaaccaacaataccttacttacatggtttgtagccacaaatcatgcagtctaggtaattcaaaagaccgcaatcctatagtttagcttaaaataatcatcaaattatacagcatatatatgtattaaaacattaaattgtaccccataagtatatacagtaacaatgttaataaaatattttaattaaaaatataataataaaataatcctcaaatggtaatgtctccatatgcttggaaaaaacatgcaaattctctgtgaaagatcgtagcttaatctgtaattccagaaatttgggaggccgaggcagtaggattgcctgagcccagaaggtcaaggctgcagtgagttatgctagtgccactgcagccttgatctcgacagataacattccaagaaaaataaatttatagtcatgattctcaaatcataagtgaaaacagacaccctgagtgaaaaccagcaaggaagaaaacaaaaccaaaaagctagacagcagtatcagatcctcaaagactttaggtattgaaattattaaatacagaatataaggtaagtaggtttaaatgtacgtcctggctttatttttaattttttttatttttactttttgtggtacatagtaggtgtatatatttatggggtacatgagatgttttgatacaggtatgcaatgtgaaatcagcacatcgtggagaatggggtatctatcccctcaagcatttatcctttgagttacaaaaaatccaattacactctttatgttattttaatatatacaattaagttattattcactatagttaccctgttgtgctatcaaagagtaggtcttattcattctttttaattcatttgtttttttaaattaatttaattcatttaattaattcattcattaaccatctctacctcccccagtcctccccactacctttcccagcctctggtaaccattcttctagactctatgtccatgagttcagttgtttttgatttttagatcccacaaataaatgagaacatgcaatgtttgtctttctgtgccgggtttttcacttaacataatgatctccatgtccagcgatgttgttgcaaatgactggatctcattctttctttatggctgaatgatgctctactatgtatatgtaccacgttttcttttcttttcttttcttttttttttttttttttccgagatggagacttgctctgtcatccaggctggagtgcgggcagtggctcgatctgggttcactgcaaccgctgcctcccaggttcaagcaattcttctgcctcagcctcccgagtagctgggattacagatgcctgccaccacgcccggctaatttttgtatttttagtggagatggggtttcaccatgctggccaggctggtctcgaactcctgacatcatgatctgcccacctgtgcttcccaaagtgctgggattacaggcatgaccgtgcctggctctttttttttttttttttttgagatggagtctcactctgtcgcccaggctggagtgcaatggcacaatcttggctcactgcaacctccgtctcccaggttcaagcaattctcctacctcagcttctcgagtagctgggattacaggcgcccgtcaccacactgggctaatttttgtatttttagtggagatgggattttgccatgttggccaggctggtcttgaattcctgaccttatgatccacccacttcggcctcccaaagtgctgggattataggtgtgagccactgcgcccggcctgtaccacactttctttattcattcatccattaatagacacttccaaatcttagctattgcaaacagtgctgcaacaaacgttggagtgcggatatttctttgatacactgatttcttttcttttggctacctcctcagcagtggggttgctggatcatgtcacggctttatggttgtctgctaacacccattctccacctttagcaacagatctctcaagtgtcagctgagcacacgtctacccagctagagacagtctttctcagtttctcttgcagcttaacatggctgtgtgactgcgttcaggctgagggtgtgtaagcagacaacaataattttttttttacaataatctttcatgaagttaacaaacaagaaggaattaaaatacttgatgatattagggtatgatttgggagatgggtaatacgaattaaaatgttctgaggtctttgtgttattttgatagcgagtaaagatattaattacattaggctctgataagtatgcgcgctacaattttcagagtaccctctaaaaggtgaaatttggacttgaatccaggatctcagtttctaaataattctggaagaagaaaattcttagagtgctattggcttttcagctgcagaatactggcacatcagaagaattgctgggagtccaggacccaacctgtcactgagcgttcccgcatacctgaccctctggaacttcccatcacagccactaggcagactcacttctgagcctttcccagcacaccgctgaccctttctgtttctccagctcactcattcagagctccttcatgtcttcagccacctcctgcttgccagcttccttctaacagaacttgcatgtcaggaaagctcgttcgcctacaaataaactatctgagagactgtgtcttccaggaagcttctcgtcattgttgggggaaatgcagacaactcactttggtcattgcaatggtttggatgtggttgttaaaccctgccaagtctcatgttgaaatttgattcccaatgttggaggtggagcctggtgggaggagtttgggtggttgaaacagatccctcatgaacagctcggtgccattctcaaccagtgagttctcactcttagttcccacaagaactggttgttgaaaagatcctgtcacctcctccattccttctttccagcttcctctctctcgctatatgatctgtgcaaaccggctccccttctccttcggccacgagtggaagctttttgaagccctcaccagtgcagacgttggtgccatgcttctcatacagcctgcagaaccgtgaggcaaataagcctcttttctctatgtcacccacagtcagggattcctttatagcaacaccaatggactatgacagaaaatacagactgtatattggaaccccatcagcctggtcacagatgccatctcagacctccccaaaccctctgctcatttgggtctcttcagtcacgctcttttagctgactgtttcccctctgctggccatacccaagtgtccagaccaaattcaagcctcctccaggacttggactgttgatctccctcctcccatcagactgtgtcccgatatggcactgtgtctctccctaaggtgtgtactctcctgagagacgcttccttggaactgatgctaaggcacatcagaaggatctcagggtggaaaggctcctatacagccgtctgaaaacaaaaacaaaacagaggggagctcctatggttgagggtcagaaggagaccctaccttccttctcctgctatgagtctgacagggggcgtattcaatactctcccacaccctcagttctcatgccccagagaccccaaacatgttttcattatctctcttcattatgtcttctggatctctcttcccctgttccttcaatgtgcattgttgagtgcttactgcatactcagtaatactccatttgtcttctgcccataacccaggagcccagagtcctagttactggtctcttttgcgtcacctattactgtttgctgtagagatgtgaggtcctactctcttggctcagttcattagggcttctttcatgctaaagcaggcccacaggacttcctgaccagaaaacaaattcttgagctgcaacaggtttctaacccgatccctgcttcaaagggtgggtcccttccactctgacaaccatgatctcctcatcccattctacttcctgctgcaacccagccaagcaccctgcctagtgtggtcatgtcattctcctttctcaccttcctcttgacccctgctctattccgtcccaggcttggtatcgttctctcacctgcctgtagttggcagactgtcaggtcaactgccccacccctcctcagaccatatgaagctataaaggcccctgcagctctttcacaacagagaaagaggcaactacattgcctggaggaagcctaaggaacccaggcatccagctgcccacgcctgagtccaagattcttcccaggaacacaaacgtaggagacccacgctcctggaagcaccagcctttatctcttcaccttcaagtcccctttctcaagaatcctctgttctttgccctctaaagtcttggtacatctaggacccaggcatcttgctttccagccacaaagagacagatgaagatgcagaaaggaaatgttctccttatgtttggtctactattgcatttagaagctggtgagtgattttatttaaaatcgggtggtctgagaacctttgaggagttgggagagaaatgtgaccactactggggccagctctgcttctcttccatagagtgaggatcatcattttactcgaatcacttcagcctaacaaggtatgtcatgcaggaagcagtcagacacagtggttaaaattgggctctggtctcacattgcctacatttgaattatggctccatctattaactgtgtactttaggtcagttgcttctctgcgcctcgatttctgcatctgtaaaatggtaacaacctgtgtaatatggttggggttttaaatattaagaacaagaagagtcggctgcttttaaaatgtcactcttctggcggggtgcggtggctcatgcctttaatcccagcactttgggagggtgaggcaggcaggtcattgaggtcagaagttcaagaccagcctagctaacgtggcaaaaccctgtctctactaaaaatacaaaaattagctgagtgtgttggcttgtccctgtactcccagctactcaggaggctgaggcaggaaaatcgcttgaacccgggaggcggaggttgcagtgagccaagatggtgccactgcactccagcctgggtgacggagtgagactctgtctcaaaaaaataaaataataaaataaggccaggctcagtggctcacgcctgtaatctcagcactttgggaggccaaggcgggtggatgtcttgaggccaggagtttcagaccagcctggccaacatggtgaaactccatctctactaaaagtacaaaaattagcctggcggggtggcttatgcctgtaatcctagctactcaggaggctgaggcaggagaatcgcttgaacgtgggaggcggatgttgcagtgagctgagattgctccactatactccagcctgggcggcagagcaagactccgtctcaaaaacaaataaataaataagcaataaaataaaataaaataaaataaaataaaataaaataaaataccactcttctatattctacaaactcaatttctctcctacccctacacctaattcctcgtcagcttcccacgtacaggctggggaggttgaatgtcttcatccttctgggaaatcaagggcaaaaatttgacataaccttaactccagccaagcctccaagaagttaaaagccttccctctacctttagacgttggtttacagcccttattcctgggagctcttatgtatttgagctacatataactcgttcttctctagccttggccatagtgatcaagggcccctggaacttgaatgcatatagtcacctggcttcttgttgtacatgcagactcctgggccccatctcaaattctaattcatttagtctggaatgatttgcttaagaatattttcaacatgctcccttaagtaattctgaaataagtgtgttctgaatattattctgagaaatattttccaagaaggaagcaatactacttaagaaaaaaattgatcagtatatactagtttcacctagtcctataattcttttataatactttatatctgtattgtatcttgcatagcagaatgtggaaaaaggttagctaccagtgaaactagatgatgtaactctggcattgtgggtgggtggttgacttagcttagtctccacaagtgcagatttagtagcctgggttcagtttcctgttccaccactcactagctgtgtaaacttgggccagtgtcaacttttttttattttttatttttgagacggagttttgctcttggcacccaggctggagtgcaatggctcgatctcgactcaccgcaacctctgcctcccgggttcaagtgattctcctgcctcagcctcccgagtagctggaattaatgcccggctaattttgtatttttagtagagatggggtttctccatgttggtcaggctggtctcgaactcccaacctcaggtgatccgcccaccttggcctcccaaagtgctgggattacaggcgtgagccaccgtgcccagcccagtatcaacattttgaagcctcaatttcttcatctcagctggtgataataatagcatctatgttatagcaccatagtgagcattaaataaaattatgtaatgaatttagccaagcaataagcagaaagtatatacacacaatatatatttgtcattatatgatttcttcagcaacaaattccaatgagactagcacctctgccaacactggatccagtgtgatctccagtggagccagcacagccaccaactctgggtccagtgtgacctccagtggggtcagcacagccaccatctcagggtccagcgtgacctccaatggggtcagcatagtcaccaactctgagttccatacaacctccagtgggatcagcacagccaccaactctgagttcagcacagtgtccagtgggatcagcatagccaccaactctgagtccagcacaacctccagtggggccagcacagccaccaactctgagtccagcacaccctccagtggggccagcacagccaccaactctgactccagcacaacctccagtggggctagcacagccaccaactctgactccagcacaacctccagtgaggccagcacagccaccaactctgagtccagcacaacctccagtggggccagcacagccaccaactctgagtccagcacagtgtccagtagggccagcactgccaccaactctgagtccagcacaacctccagtggggccagcacagccaccaactctgagtccagaacgacctccaatggggctggcacagccaccaactctgagtccagcacgacctccagtggggccagcacagccaccaactctgagtccagcacacctccagtggggccggcacagccaccaactctgagtccagcacgactccagtggggccggcacagccaccaactctgagtccagcacagtgtccagtgggatcagcacagtcaccaattctgagtccagcacaccctccagtggggccaacacagccaccaactctgagtccagtacgacctccagtggggccaacacagccaccaactctgactccagcacaacctccagtggggccagcacagccaccaactctgagtccagcacgacctccagtggggccagcacagccaccaactctgagtccagcacaacctccagtggggccagcacagccaccaactctgggtccagcacgacctccagtgggaccagcacagccaccaactctgagtccagcacagtgtccagtggggccagcacagccaccacctctgagtccagcacgacctccagtggggccagcacagccaccaactctgagtccagcacagtgtccagtggggccagcactgccaccaattctgagtccagcacaacctccagtggggccaacacagccaccaactctgggtccagtgtgacctctgcaggctctggaacagcagctctgactggaatgcacacaacttcccatagtgcatctactgcagtgagtgaggcgaagcctggtgggtccctggtgccgtgggaaatcttcctcatcaccctggtctcggttgtggcggccgtggggctctttgctgggctcttcttctgtgtggtgagtgcctaatatgtaagaaaatgcctgggggaaggagcagcagaaacacaaggaaatgggtgtgaatagaaggggtctcaagtcaggggtgggtagggaggaagggagatcaggaaagagtaacacagagacatggtaggtcaatgcagaggaagctgctgacctgcgggaaaagggggccacagaaaggactggagaaaggagaactaggtaaagagtgtggttggaagtgggagaagattccagaaggcgtacgtggtaaaggcgtgggagacagggatgcaattctgaaactattgactcttctttttttagagaaacagcctgtccctgagaaacacctttaacacagctgtctaccaccctcatggcctcaaccatggccttggtccaggccctggagggaatcatggagccccccacaggcccaggtggagtcctaactggttctggaggagaccagtatcctcgatagccatggagatgagcgggaggaacagcgggccctgagcagccccggaagcaagtgccgcattcttcaggaaggaagagacctgggcacccaagacctggtttcctttcattcatcccaggagacccctcccagctttgtttgagatcctgaaaatcttgaagaaggtattcctcacctttcttgcctttaccagacactggaaagagaatactatattgctcatttagctaagaaataaatacatctcatctaacacacacgacaaagagaagctgtgcgtgccccggggtgggtatctagctctgagatgaactcagttataggagaaaacctccatgctggactccatctggcattcaaaatctccacagtaaaatccaaagacctcattcttatctgtgtgtctgcattttctaatcctttttgccccaggcaaggtccctgtatctctgagacaccccgattggctggagaattgacttgggagagataaggagggagggcgggtgccagcatgctatgggctcctgcgtgaggcctgtggtacacagagattaggttgtgatacatgaagagccaagagcaggatgaggtggaggcgttacaactacctgctctgtgtgtggggggggaggggggaggggggtacgcatattcacttgaagtcgaggttcccagggcatttccatgtgctccaggcctgactacccatcagggtggaggagctggtgacactcatctccctgagtgctccctggtttcccaagggaaagactttctggcctgctgaggtcgaatcttccaagaggctcttgcaaagacccgagattctcataaatccccgcccagaagagctgcacgtatccctttcatgagtccagggaagagggtcctccaggtcttggaagacagaggggagctgctttagaggctaagttgctttgagcccacaaggtaatggagggctcctacttgggacagagccctcagcagagaattagcagtctgttggtgggttcaccccaactcacagcagtagaaactgctccatcttccaccacttattgggtttctccagtgtcagcaaaccaaagaattggatcttaccaatgcggctataggaaaacagcctgttgcatggtaagagtgataccatcttgaagtgaaaccaccacaatggccattttttttttagatggagttttgcagtggtgcaatcatagctcattgcagccttcaattcctgggctcaggcaatcctcctgcctcagcctcctgagtagctgggactacagtttcgtgtgccaccatgcctggctaatttttagaattttttgtagggacagggcctcactctgttgcacaagctggtcttgaactcctggcctccttgaactcctcctgccttggcctcccaaaatgctgagattacaggtgtgagccactgcacctcgccagatgtccaatgtctgactcctgcataccaaggtgttctgtatcaagggctttaaaacaatgcctgtagcgtaattaacctctcacaaagatgcttatctaacctccccagcagtcatgggtttcagcaagaaagtctgtgatgtgaccagttgcacatgttttcccctaaaagcttactctagaaaggatattttttggagagggagtgtgggaatccaccatcttgtggccacctcagacatcacttctctttggaagactccattaaatatttctctgtgagaaactggatttgtcagtctctttctttgatctcttttcccctcaaaatttaggggtaggtttgtgtagacctgttcatggtagaacatttggtgatcccccagccagtagctgggagaacaaggaatgggtaaggagaatgaagcatctgtaaggaaaccccagggcggcagccacgtctgtgtagggttggatggcacaactgttcgatacctgtgtacctctgtgtgagtgcagggatgccttgaaaatgccaggtggcctagagcagttattaactgaaagccgcatagtgcactggggtacggaaggtcggccaatagccactgcagagggttgggtgcttcttttggcaatgaagatccggctagcagcagaagccaaaattaaatgtctagagaaggaattgcaactagaaaaagacgtgtacctctccatgtctctcctcacatccaacttagcaaacaaaattgaagaccaagagacaaaaattgaaatgttagcatgtagatttgtccacctagggcgaaagatatggaaatgaccaaaaatcagagctctcatgagaaagcccaaccgggatgtgaaaacttggaatccctgggattgttatgaagaggaagactgatgacatagaagtcacaggtgtggagggggatggggatcattggcaagctcgctgtctcatgcaaaggaaagtgaaacctaacattggcagcaaaacgggggtcagctgatacaggagactctcactgtcagggaacctaccgctgcagaactcttagagattgcaaaggcctttaaacaactaccgaggaaatccctggctgcttggatggtctgattgtgggacacaggggctgatgatatttccttaacaggagaagcagaaaaaatgagtaacatcaccacccatgcagccctgcagaagcatctttgctaaggcaaggcagacgcaagggagtcatagcttatggactggctcattctagctatgagggaggcttgacctaatgagggaaatttaccgggaaggatgacctcctggcagtcaacagaaaaggcccaagggcttctccaagaattaggaatgagtcaagtcatctatgtttgggttctcacaggacttaaaacagttttttcctgcagggatgaaaaataaattgctgaagggtgcaccaggagaatggcacaacccttggctcatgttattgagtcctataaatgggacaagaagtatatgatgtgggaaggccaggcacaggggctcacacctgtaattccagcaatttgagaggccgaggcaggcggattacttgagatcgggagttcgagaccagcctggacaatatggtgaaaccccatctctactaaaaatacaaaaattagctaggtggtgtgcctgtaaccccagctacttgggaggctgaggtaggagaattgcttgaactcaggaggcagaagttgcagtcagctgagattggggcactgcactccagcctgggcaacagagtgagaccccgtctcaaaaaaaaaaaaaaaaaaaaaaaaaaagggctgggcacggtggctcatgcctgtaatcccagcactttgggaggccgaagtggatggatcacctgaggtcaggagttcaagaccagcctggtcaacatggtgaaattccttctctactaaaaatacaaaattagccgggcatggtgacaggcgcctgtaatcccagctacttgggaggctgaggcaggagaatagcttgaacgtgggaggcggaggttgcagtgagccgagatcgtgccattgcactccagcctgagcaacaacagcgaaacttcgtcttaaaaaaaaaaaaaaaaagatgtatatgacgtaggagaagccatcacagatttgggagctactgagaaagctagggacggggtgtgctttgtaacccggcaagggctgacaaaggggaaagataatgctccacaggaagaagggggaaaataagggaaagcgaccaactagagtcaagaacaggcaaatgtggcatgacttattgggagcagaaaaattctgagaaaaaaatatgtaaaaaatgttaaaatatggaaaatatgaaaaatgctgtgttagtagccttatggagggaagtacagactgaagggctgttttgtcccttcatttctgcccctctagcagaagaggaagatgactcaacccctcattctaatactccagcctatcagagggggattccatgctgggcccaagattagcagtgggaccaaggtcaaccccacgttgcaggtgaccagaggccccatattgagctcaccatttactgttcctctcaaaaaaataaggagaagactatttccttagtagatactagggcagaatatactttaattcatggaaatccataaatacaccctggtcaatggtctgccatcactggttatggggacaaacgatctggatgagaaggactttaatacatctaggtattggggaagctcccctgccccatatgtggtgtttatttttcttattccagaaaacattttaggcacaggtattctgttaggaaagacttagcaaacttcagtggaaaaattcagatcgaaggtgcatgtagtgaagactgtttttttttttttttttctttttcttctttctttttatttatttatttatttattttttattgatcattcttgggtgtttctcgcagagggagatttggcagggtcataggacaataatggagggaaggtcagcagataaacaagtgaacaaaggtctctggttttcctaggcagaggaccctgaggccttccgcagtgtttgtgtccctgggtacttgagattagggagtggtgatgactcttaacgagcatgctgccttcaagcatctgtttaacaaagcacatcttgcaccgcccttaatccatttaaccctgagtggacacagcactcgtttcagagagcacagggttgggggtaaggtcacagatcaacaggatcccaaggcagaagaatttttcttagtacagaacaaaatgaaaagtctcccatgtatacttctttctacacagacacagcaaccatccgatttctcaatcttttccccacctttcccccctttctattccacaaaaccgccatcgtcatcatggcccattctcaatgagctgttgggtacacctcccagacggggtggtggcctggcagaggggctcctcacttcccagtagtggcggccagtcagaggcgcccctcacctcccggacggggcagctggccgggcggggggctgacccccccacctccctcccggacgggttggctgccgggcggagaggctcctcacttcccaaacggggtggctgccgggcggaggggctcctcacttctcagacggggcggctgccgggcggaggggctcctcacttctcagacggggcggttgccaggcagagggtctcctcacttctcagacggggcggccgggcagagacgctcctcacctcccagacggggtcgcggctgggcagaggcgctcctcacatcccagacggggcggcggggcagaggcggtccccacatctcagacgatgggtggccgggcagagacgctcttcacttcctagatgtgatggcggccaggaagaggtgttcctcacttcctagatgggatggcggccgggctgagacgctcctcactttccagactgggcagccaggcagaggggctcctcacatcccagacgatgggcggccaggcggagacgctcctcacttcccagacggggtggcggccgggcagaggctgcaatctcggcattttgggaggccaaggcaggcggctgggaggtggaggttgtagcgagccgagatcacgccactgcactccagcctgggcaccattgagcactgagtgaacgagactcccgtctgcaatcccggcacctcgggaggccgaggctggcggatcactcgcggttaggagctggagaccggccccgccaacacagcgaaaccccatctccaccaaaaaaaatacgaaaaccagtcaggcgtggcggcgcgtgcctgcaatcgcaggcactccgtgaagactgttcttgagagaggaagaaaatgggagcccctacaacttcctgcccctacatggcgttgtcaacattaaatgattcatattgtccagggggtatgctgaaataagtgcaattattatcctcccaataagtgcaactattatccacccagcacaaagcccatgaaagagtcttgtcttttttcgcattcccgtcttttcttctagttttgttatcttgttggcattatgtcagccgctgaagcttttactgtgctgcagccatggcttttctttttttaacttttattttaagttcgggggttcatatgcaggtttgttacataagtaaatgtgtgtcatgggggtttttttgtacaggttatttcgtcacccagctattaagcctagtacccattagttatttttcctgatcctctccctcctcccaccctccaccctctgataggccccagtgggtgttgttcccctctatgtgtccctgtgttctcatcatttagcttctacttataagcgagaacatgcggtatttggttttctgttcctgcattagtttgctaagaataatggcctccagctccatccatgtccctgcaaaggacatgatgttgttctttttgtatgactgcatagtagtccatgatgtatatataccacattttctttatccagtctatcgctgatgggcatttaggttgattccatgtctttgctattgtgaataccactgcaatgaacacatgcatgcatttttttttttttttgagatggagttttgctcttgttgccgaggctagagtgcaatggtgcgatctcagctcactgcaacctctgcctcccgggatcaagcgattctcctgcctcagccaccccagtagctgggattacaggcatgtggcgccacgcccatataatcttgtatttttagtagagacaggggtttctccatattggtcagcctggtctcgaactcctgacctcaggtgatccacctgcctcagcctcccaaagtgatgggattacaggcatgagccaccgtgcctggccacgtccatgtgcttttataacagaatgatttatattcctttgggtatatacccagtaatgggattgctggatcagatggtatctgtctttaagtctttgaagaatcaccacagtgtcttccacaatgactgaactaatttatactcccaccaacagtgtataagcattcttttttctccacaacctcgccagcatcttttattttttgactttttaataatagctgttctgactggcgtgagatgatatcttattgtgggtttttgtttgtttgttttgagatggagtttcgctcttattgcccaggctggagtgcaatggcacaatatcattgtggttttgatatgcgtttctctaataatcaatgatgtttagctttttaaaatatgtttgttggccacatgtatgtcttcttttgggaagtgtctgttcatgtcctttgtccactttttgatggaattgtttgcttttttaaaataaatttgtttaagttccttatagatgctgaatatgagccctttgtcagatgcatagtttgcaaaaattttctcccattctgtaggttgtctgtttactctgttgatagtttcttttgctgtgcagaagctctttcgtttagttaaatcccattttcaatttttccttttgttgcaattgctttcagaatcttcgtcatgaaatttttgcccatgcctatgtcctgaatggtattacctaggttgtcttccagggttttatagttttgggttttacatttaagtctttaatccatcgtgagttaatttttgtgtaaggtgtaaagaaggggtccagtttgaattgtttgcatatggctagcctgttatcccagcaccgtttattgaacagggaattctttccccattgtttgctttcgtcaggtttgttgaagatcagatagtcgtgggtgcgtggtcttatttctgtgttttctattctgttccactggtgtatgtgtctgttcttgtaccagtaccatgttgttttggtttgcagtaatgtcttatggtattgggtgctcatctatggaatggagatgggccatcaatcctcagaagatgcaaggcccagagcccacagtgaagattttttgtttgtttgttttgttttgttttgttttgttttgagacggagtctcgctctgtcacccaggctggattgcaatggtgcgaccttgtctcactgccacctccgcctcctgggttcaagcgattctcctgcctcagcctcccgagtaactgggactacaggcacctgccaccatgcccagctaacttttgtatttttagtagagatggggtttcaccatattggccaggctggtctcgaactcctgaccttgtgatccgcccaccttggcctcccaaagtgttaggattacaggtgtgagccattgcacccggcccacagtgaagtttttaggggttacatggttgggtaacactcctttgatactgggtgcaataattgacaaagcccaacaatgtcaactccagaaacagtcaaagaaatccaaacatttgtgggtcttttgggttattggagagtatgcatcccatacttagcacagtttttgagatccctatacagacttatcagagaaagggcacattgggcctgggacacaccacagcaggaagctttgaacaggctgaagtgttggtacagcaggcacaggccttaggcacccctttggagggtacagctaggactttggatgttactgctgctcctgaggatatgagtggggccttatggcaaccgcagtctagggaatcagtccttttaagaaaggagccaaaaccagatactctcctgttgaacaagaagtgctagtagtagagaatgctttacagcaggtggaattgctaacaaagacccttcccatgactgtgagaataggtctaccaatcaagggatggttagaaggatttttaaacaacccacctccgctgtagccccaacacctaccttgaataaatggcatgattatttgcaacaaggaagaatgctagcaatgagtcccttaagcccagaattacatactgcattaggctctgttatgacgtgaacaaacaaaggataccacctgaccctctccaactccagcacctgacatggtaagcatccagatgatgcttggtgtacagaggactccagcaggggaaaccgctgttcttggaccgctgttgctacacagccacaaactgatacaatctggtttgatacaggtgggcatcagaggagccactgggatgagttgcaagcagcctggttaatagtcacatatgagcctggcccctggttctttgcactgatagctgagctgtattcaaaggcctaattatgtggctggctcaacaggaactagaaaagtggatgattatgcacaaacctatatggggcatgaacatgtggcaagacatacggaaaaagccgcaaagccttgtggctgatttaactgtatttcaggtgactgcacataaaaaccactcagttccacaaaacatggaagctaaaaccctaaaaaaaattagaagcatcatgccagctcaggcctctgaactattgacctgggtacataacaaaagtggtcacagaagtgcaagagtaggctgggagacagtcaaggaagcaggattactcttaaaatgtagtgaccaggctgggcacggtggctcatgcctgtaatcccagcactttgggaggccgaggcgggcaaatcacctgaggttgggagttcgagaccagcttgaccaacatggagaaacctgtctctactaaaaatacaaaattagctgggcgtggtggcatgcacctgtaatcccagctactcaggaggctgaggcaggagaactgcttgaacccgggaggtggaggttgtagtgagccgagatcacgccattgcactccagccagggcaataagagcaaaactccgtctcaaaaaaaaaaaaaaaaaaaaaaaaaaatatatatatatatagtgacctagtcctggtacagtggctcacacatggggaggccatggtgggacgattgcttggggccaggagtttgagtccagcctgggcaacatatcgagatcccatctccacaacaacaacaaaaaatatatagtgccttcccaacagctcttacaaattgtttaccatgttctctattgtagatcatattgagcaggacacattcagatattcagaaggctgtccaccatgtaacagattggcaagtggattatttagatactgtccctgtaagccaaggaaataaatacatgttaacctgcatggacaccgctactggactgctgcaagattctccctataagcaagctaatcaagccagtactattaaaggcttagaggctctcagtactatgtatggatatatctggcacattgacagtgaccgagggacccatttcgctggatatgacatgcaggactgggccaggaaacatgatacactatggcacttttatctcccatagaacctccaagcagcagggttaattgaaagaaataccagtctgttgaaagcacaaattcaaactctaatttgggaaacctaccttgcataggcagatgaatgtgttatctccaacctttatttctttaaattcagccaaagcagggacgcctgccccatgtgaccgtctaggacaacggtcccccaagcctaccactgttcccataggggtaattgagacgactgctttgcttgctcccagacctcattgacaaccagtgtcttttgcacatgaagatgccagcagatatactaccgaggaggaaacacaccgagcttggaacgacaaatagccccaggctggataggctatttcctgctagagagtgacaacaccctaaataaagaacaaaacaacctgatacccaaaaacaggctgggtttatttggttaattccgtcttttggccatgttagtcaacttgctcctcagtcttgggaacaaatgaatcattctaaagatacttggccaaattgcacaagggatatgtgatggatagcaagagactgatttttatatactatgctataatataataaaatactcattgggcatgttacagaacggacactgtgtgcaggaatcttttggttggccccaaatggaacttcctggatatgtggtaccaatttatggccttggttaccccctgcatgtttaggaagatgttctttggattatacacgggcacagactgaatagttcacacactacaaagcctatcaatctccctcatttgaaatcccactggttctgatctgttttttattggtatgattgtttggcctccatttgtcttcctcatccggttattgaagatattatctggcatatagaaactctataaagcctgtaatccctgcactttgggaggccaaggcaggtggatcagttgaggtcgggagttcgagatcagcctggccaacacggtgtaaccccatctccacaaaaaataacaaaattagctgggcgtggtggcgcatgcctgtaatcccagttacttgggaggctgaggcaggaaaattgcttgaacctgggaggtggaggttacagtgagccaagaccgtgctactgcactcctgcccaggtgatagagcgagactctgactcaaaaaattaaaaaaacaaactctacaaaaaataaaaaaaaagaaaactttaaatgatagctgcatgggaatctctcttttaaacatggaagtcactgtcatgagaaagtctgtcctcccaaattaccaggctttacatatactcacgctgcacaacggggcacttgtgcaattggaaaaactgctgtgtttatattcctgatgaatcagttaatatcgctaaattaatgactgatataaaagcccacataaccaagctctcagacccctactttgaataattggcttcacagctggtttgggtcctggggcacctggtggcataagctgcttcttggtttaggtgctgtactcgtacgttccttactgtcttgtttgagcctttactgctgctgtgttatctgcctccagtggagccaacgcactgctgctaaagctatgcactatcaagggtcctccctttaggcccagggactatcatggaagagatgagcacgtgaaattgtcagggccagttttgagaggtggagtgtaggaatacagcctgttgcacggcaacagggacgccattttgaagcaaagctgccattgagaggtgacagggtgctggaagtccgcacagcccttgctcgctctcagcgcctcctctgcctgggctcccactttggcggcacttgaggagcccttcagcccaccgctgcactgtggaagcccctttctgggctggccaaggccggagcccactccctcagcttgcagggaggtgtggagggagaggtgcggagggagaggtgcgagcgggaaccggggctgcacgcggcgcttgcgggccagctggagttccgggtgggcgtgggcttggctggccctgccggtcctgggcaatgaagggcttagcacccgggccagcagctgcggacggtgtactgggtcccccagcagtgccagcccgccggcgctgcactcgatttctcaccaggccttagctgccttcccgcggggcagggcttgggacctgcagcccgccatgcctgagcctcccaccccctccatgggctcctatgcggcccgagcctccccgacgagtgccaccccctgctccagggcgcccagtcccatcgaccacccaagggctgaggagtgcaagcgcacggcgcaggactggcaggcagctccacctgcagccccggtgcgggatccactgggtgaagccagctgggctcctgagtctggtggggatgtggagaacctttatgtctagctcagggattgtaaatacaccaatccgcactctgtatctagctcaaggtttgtaaacacaccaatcagcaccctgagtctagctcagggttcgtgagttcaccaatcgacactctgtatctagctgctctggtggggccttgaagaaccttcgtgtccacactctgtatctagctaatctggtggggacgtggagaacctttgtgtctagctcagggattgtaaacgcaccaatcagcaccctgtcaaaacagaccactcggctctaccaatcagcaggatgtgggtggggccagataagagaataaaagcaggctgccccagccagcagtggtaacccgttctggtccttttcctgactgtggaagctttgttcttttgctctttgcaataaatcttgctactgctcactctttgggtccatgctgcttttgtgagctgtaacactcatcgtgaagatctgcagcttcattcctgagccagcgagaccacaaacccaccagaaggaagaaactgtgaacacatgcgaacatcggaaagaacaagctccagacgcgccaccttaagtgctgtaacagtaaccgcgagggtctgcggcttcattcttgaagtcagtgagaccaagaagccaccaattctggacacatcatgatgaccagtggtccacttttgcatagcaaagtgcactgcagcacagtcttcaaacaatgcctgctgcataaataacccttcacaaacatgcttctttaacctccggagtggttatgggttttggcaagaaagtctgagatgtgaccagctgcatatattttaccctaagaccttgctatagaaaggatgttttctggagtgtccatcgtcttgcagctctcccagacgtggcttctgttgcttagtccttgttcaaaatttcttttggagaaactggatttgttagccacttatttcattcagcctttgttccataaaagggtcatacatgtaaagtggctcccaaacgctgaaggagccgagaaaccaaaaacaaggcagatagatccagtttgtcagtaaatggtgatttgctggggaatttacagacagaagtgtagtcttgggtggcagcaagtcaggtagatctccacacctgttacccccagacccagggcttaccccggaaagggtgtatacttcctgtagagacaattaaaagcaacctttcagaacaggcaggaatgctatgtgcgtcgtagcctgtaatttatgccataatatcaaggttgctttgatctaaaggcaggggctggatgtggtggctaatgcctgtaatcccagagctttgggagggagaggagggaggattgcttgggggcaggagtttgagaccagtctgggaaacaaaacaacacctcatctctacaaaaaagaaaaccaaaattagttgggagtggtagcatgtgcctgtggtcccagctacttgggaggctgaggcaggaggatcactacagcccaggagttagaggctgcagtgggctgagattgcaccactgaactccagcctaggtgacagagcaagaccctgtctctaaaaacaaaacaacaaacaaaaaacgaagacaggatttacagtaagtacatgtccttaccaagaacagtaaataaagtaggaatgaggcccatgtgactcatgggacctgggttaatcagaagtcaacatggcagattagcatccaagatggagtcactttgtctccacagcctctcagctccctcagtctttgggggaaggtttgcatgcccctgctcactgaggaacagagaggccacgctgagccatatgcaggcaatcatcatcatctgctcacttaaagggatccagaaaccagaagggaaagacaagttgaacaccctgaaaaggtgcctcccactgataggaactgtggaaacccttatgtggaaaagcatgaaaagaaataagatcaggcaagggtgtccagctagatcattttttaaaaaaatagtaaaacatgtattttcaaattttaatagacaaattgaaagaggctggccattatagagaattatgctagtaatccggaagagcaagcgcgaaaaataactcaaacagacacaattatacaggaataaaaatcacccggcaaatataatacatttggaggatagatccaggaagactaacgtgcaagtaataaggctcaaaacagagaaaaagagacgaaatggaagagaagaattagaagggaaaaaagaagagctggaatagagaaaaaagatttgagtctgtctatgaaaagcttcaccaagtacaactctgtaaatatactaaaaaacactggtttatttatttatttattttagacggagtcttgctctgtcgcccaggctggagtgcagtggcgtgatctcagctcactgcaacctccaccttccaggttcaagtgattctcctgcttcagcctcccgagtagctgggattacaggtgcgtgccaccacacccagctaatttgtgtgtgtgtgtgtatttttagtagagatggggtttcacaatgttggccaggctggtctcgaactcctgacctcaggtgatccacccaccttggactcccaaagtgctgggattacaggcatgagccactgcacccggcctaaaaccactggtttatatactttattttattcttattatttttttaaatttgagatggaatctcactctgtcaccgaggctggagtgcagtggcgcaatctcggctcactgcaacctctgcttcctaggtttaagagattctcctccctcagcctcccaagtagctgggattataggcgagtgccaccatgcctggctaatttttgtatttttagtagagatggggtttcaccactgttgaccaggctagtcttgaactcctaacctcaggtgatccacccatctcagcctcccaaagtgctgggattagaggcatgacccaccttgcccagccaggtttatatactttaaacaggtgaactatatggtatgtaaattatagctcaatacagctcttaaatttttaccaggcacattatgtaaataaaaatttttatttcctggccggacatggtggctcacacctgtgatcccagcattctgggaggctgaggcaggcagatcacttgaggccaggagtttgagaccagcctggccaacatggcaaaaccctgtctctactaaaaatacaaaaattagccatgcgcggtggtgcgcgcctgtagtcccagctacttggaaggctgaggcaggagaatcacttgaacctgggaggtggacgttgcagtgagctgagatcatgtcactgcactctagcctgggtgacagagtgagactctgtctcaaattttaaaaaattatttccaaaaataaacaacaaatgactcaaatgaatgggcattttgagctagaggaaggagaaaaggggggagtccctggtgagcaatttaccttgtgattgattcacatagttgtgctgtgagtatctcattactcccagcaactggggtgtgcaggtagagtttggaagcatcattacccagctttcgtcatggaatacacctactcctgtaatgtgacaaagccccagcccaccaagcatgcgtgacccaagcaaaagtccaggaagtggacagggttaaagggctgcccatctagacctgtgcctttgcactgtggatttagcacaatgatcttcacgtggcatctgtgcccccacatcttgggcgtacataaagacttcctgaagagtattatgcaggcgtgggttgtttgatgggaaccattttccagatcttcaacttccgtatgtgcttgtggcctagaactgatctgtctgagggcacctctgtggtcagggctacacttttctgactcttctttgatgaacatccaacatttcctctgtagctcccatattattattaccacatttccgcagggtgtagaacatttcagggtgtcaaataaagccttttagtgaagggatacctcaaaaaccacctctaatttagggatcatatacccagagtaggacttcctgttttctcctgcctcatataaattcctgtgaagggctacgtggagtgtaaggaactggtaattttggcatgtgttaaggtgttatttacgcagatacactgtagaatgaagtaacaggagtaataaaaacttctttttttcctttcttttttttttaacaatctcttctcttccatccactctttaaaaatgcatccctcttgagggagtatctcatgagattggagcaagagcagaatcagcagaaagaatagaggaggcagtggcttatttaaccaaggagaaaaatcccatggcagccaacccaccttatctgtctgtctgcctattttagaatattcaagatttgtcaacaacttgctgggacaaagcaatgtgctatgaagcacacttccctgaattgtacaccattttctgtaaggggaaagagcttcctgttcactagtttcttggtttaggtaacaattgtgtatttggcatgatttcaaggagaaagatgttgtaagctccaactgattaatgttacaccttaagataaaagacacttagagaggccatacggcatgtcagctaagagcacagattgtggagctcgaatttctggtttcaaatccaatttcattgtgactttccacaaattccttaattcttctgggtctcagtttccatatttgtaaacatgagagtgaaaatagtacccacttcatggggttattgtgaaggcttagaatagtcctgcatttcgtaagcgctctgtaagttgtgttatttttaaaatgttaggtaagtgggccaagcgaggtggctcatgcctgtaatttcagcactttgggaggcggaggcgggtggatcacctgaggtcaggcttttgagactagcctgaccaacatggtgaaaccccatctctactaaaaatacaaaaactagctggcgtggtggcaggcacctgtagtcccagctacgtgggaagctgaggcaagagaatagcttgaacctgggaagtggaggttgcagtgagccgagattgcaccactgcactccagcctggtcgacagagcgagactccgtctcaaaaaaatgaaaaataaaaaatgttaggtaagttaatgattcatattttcttgaaaatatggaaagacgtatcataagagaagcatttttgcttaattcaccaaaaagttactgggggctataaattgaacacagagtcttacaaggcacaggaaattttttagacgtttataaacatatcttttgatgcagaggagtatgacagggtgatcaataaaagcttttcaagcaaaaaattattacagaccatatgacatcccagaaaagacaaaactataaaggcagtcaagagtcaatggttgccaggggttacgagggtggggtgatgaataggtggagcacagaggattcttagggcgtgaaactactgtatatgatactacaatggtggatgcctgtcattgtacatttgtcaaaacccatagaatatacaagagtaaaccctgacgtcaacgaggtggggaggttgtgcttgcgtaggggcagggagtctatgggacctctgtacttaccacttaattttgctgtgaacccaaaactgctctaagagataaggtttattaattagacatactgtgatatatgtatagcagtagaatatttatgttactggtatttaatatgatatatggagagagaccagtagaataatatggggaaagtaaaatggaactataagttcgtagagcaggaggaaccatttaaaaacctagactattgaggaagagcttgcttatatgttattcaaaaggataatggaagctaggtgcagtggctcacgtctgtaatcccagcacttggggaggctgaggcgggaggattgcttgagcccaagagttcaacaccagcctgagcaatatagtgagaccccccacatctcttaaagtaaaataaaatttaaaaaaaggataatgatgagtattgagatgctgctagtgtttagagtctactggaaacattttaaagagtagtaaaaacttttattatttcaatgtctacatttacaatatggtagaaattacattctttgcaataattaaatgtatgataaaaaatttagattaaacatagacagaggagggaaaacagcttttcaaaattgtttttgaacgtatacacaacagaaaatttgaagatgggcactcaagcacataggacatttctacacaaatggtggctccagatagctgaagaagcttaagcagctgtaggagagatctccaaatccagggacagtggctgccatcagagtggtccgtttgtgggaaaatgggtcacagacatagaccatatcaggctatatttcacagaaaatcttcttctttttgttactttctgatgaactatatgctatatggaaggtaccattgagactccttgtgatgaaaataactctacttgaattgggggtaaactaaaattagaagggaaagcagaccccttgtccagccaggttgaagaaaatctaagccggtacagggtgaggttgagagagatggcagcgagaatctggaacacaggcctttcctaaatcaaactttcagcacaggtcattcaagggcgaatttcaaatctatgctatgtttataaattgtgtactctacgtaattgccgggtccctggaattccctactctgtgcgaaactaatctcttactctctaaaacaaacccaagtcctaagcccacaacccctgtttgctctttccttcctagtcatcagaaccctcatgactcagactctccaaggaggcatttaaaaaaatgttctcggaccagtcagctccactcgagcaacctgctcttaactcattaattttcccgacatgtcccttatgatgactcgtccatctgtttttcaaattccacatagctgggcctctgtagctttgtggttttatattccgcatactttctaacagtgacagctccagaatttctatgtcagatgaagttgggaacaggcagtctggttggaggaagatattcaggggccagactcaaagtcctgtttggacatgacaacctccttttataatggcgaagagcacaggctctgcagctggactgatagtttaattcctgactccatcacttactaactttgtgagtttggccaaattacttgacttctccatggtttagtttccttatttgtaaaatgaagacaatggtagtactgtgtctcagagtcgttggatgccaatgcaggatcccagtgaccagatggaacgagagggagctcaggagagaccagcttgaagggccgaagtcttgttcccacattgccagtaggaggcataaattccccctcagaggacgtgcaggaaagaagtggaggggagagcccttgaaatggggggaaaacagtcctgagaggggcattaaatttcatatggccaagtatttacccaaaagagacctgaaacattgttttctttttctttcttttttttttttttgagacggagtctcactctgtcacccgggctggagtgcagtggtgcgatcttggctcactacaacctctgcctcccgggttcaagcaattctcctgcctcagcctcccaagtagctgggattacaggcacccgccactacgcccagctaatttatttttatttttatttttattagagatggggtttcaccatgttgatcaggctggtctcaaactcctaacccgcccaccttggcttcccaaagtgttgggattacaggcgtgagccaccaaaatttttttctttcttattgtttttaattctccccccaagcttactgaggtaaaatagacaaaaattatatgttttcagcgtgtacaatgtgttgatttgatgagtatacattgtgaaataattaccactatcaaactaatgaacacatcaccaacacatatttaccatttcttttctgtgtgtgttagcaaatttcagatagacaatacaatattgttaattatagtctccatgtgattaaagttccagaactcattcttcttataactgaaagtttgtacccttgactgttgtttttaatctttaaattgaggcttaaaatatatgcagtaaaatgtgcagagtggacacataagtgctcaagtcgttgaattttatttaattctttaatgtatttattttaaagaaatagagacagggtcttgctatgttgcctagactgctcttgaactcctgggctcacacaatcctcccacctcagcctctcaaggtgttgggattacaggcatgagccaccgcacccggccaattgttgaatcttaacacatgcatacactcacctacccgctttccagatcaagatgtgccacattcttatcaccccagaagcctcccctgcctcctccccatcagtgccaccctagaggtagccagtattttgactttaatcatcatcagttgatttttccatgtacttgactttcatataattagaaccatacagtatgccttccaaaagagacacttttaaaagaaaatgaaatttcatcaccaatatttggcaagcttatacccgtatcctcatttccaaccccaggcttccctgccattggtgggaaagagagtctggaaactgagttgggtgagttatagcaagccaaactacatttttccttgcatatctgaattacacggggtaaatttcaatcaactgctagttgtgagcctagaaatagggacgcaggtgagtcagggtccctgacctatgcttaagagccattgccaaagattgactcagggaaatgggtagttccgtgccccatcctcttccctactcacttccgcttgatactagaagtgagactcactcagtgtccactttccccacccttggagagctcacagggagtggagtgtatcactcacgtagccatgtgctgctctgcagctgggaaggagcactctggagaaagccgggcgtgtgtcctgatgctcttatcaccctccaaatccccagcttcccctagatagactgctattgacctttaccatccatttgtttccttttcttctcttcttccttctttcttctacaaaggcctcctgctttgaaaatgaggcatacccagggaaaacaggtttcaggtcagctctggttcaaagggtgggtcccttccactccgacaagtttgatcccctcattctgcctccctccctgcccctcctcatgtgtgcgccctctggtcttgccgactctgctctctcctccgccttgattcctgtagggtacatctctccaaacggccctgcagaaagcacagcgcagaaatgcccctccctggggagggaggacccaaagttctggcctcccctactcagtatcagctataaatgccacagacacgtttgcgaggaaaaaagaagaaaaataagaagccaaactgtggagcaatttgggggctccccccaaccatgccatctgcctacaaggcttaccctggcactggctggcctttgggtctttttgtgcaactttattttctatcaaggcccagggggtttgccccttgtctctctgcctctttgacctatccttcctttggaacccaggcatctaaatgacaacttctatgtgcatcatttagagatgagaagaggaaatatctctcctgctttctggttcctgtggctgcttctctttggacttctgggacccagtaagtgacttagcagttaaggagggagaggggcatggaggccacataagccctgaaggagatggggaatcccctgcccaggcatgactcttcttccagaaacaatgatgattcatttttttttttttttttttgcccatttctgcaaaagccagtactgatcccaattccactgaccatgattctgatgctgtcttagaagcaaatctgtattagtctcccccagctgtggttgtgagcacatgtggtggggcggtggggcggtgctggggaaatggaggggggtgagattttactttcctttgtatcttggataaaagtttttttttttaaccggaaaactctagttccaatagcattcttaattccaaattaaaaccaggatctcagtctaaagtcaagtaaaaatccttcaatccttctttgttttttttccataggttatttgggtacaggtgatatttggttatgtaagtgctttattggtgaattgtgagactttggtgcacccgtcaccaagcagtgtacaccgcacccaccctatctgtagtcttttatctctcgtgcctcccccgtccttcctccctagtgcccaaagtccactgtatcattctcatgcgtttgagtcctcacagcttagctcccacctatcagtgagaacatacgatgtttggttttccattcctgagtaacttcacttagaataatagtctacagtctcatccaggtcactgcaaatgccattaattcattcctttttatggctgagtagtattccatcgtatatatatgccagtttctttatccaccgttgattgatgggcatttgggttccatgactttgcaattgtgaattgtgctgctataaacatgtgtgtgcaagtgtcttttttgtataatgacttcttttcctctgggtagatacccagtagtgggattactggatcaaatggtagatctacttttagttctttaagaaatctccacactgttttccatagtgattgtactagtttacattcccactagcagtgtagaagtgttccctgatcactgcatctacgccaacatctactgttttttgattttttgcttcaacccttcttcggatgctgcctgattccaaatccatgtataatcccctgagaacttccctggtagaaacaaaccggagttcggccactgaggggttggctctgacattggatcagcaatggctgtgaaaggaaacagcccaggggagaagtgaattgggctccgtgtgactccaatgggctgtctgagatagtactgttcactccagtctttgatttcttacatcaacatatcttccctaattatgagacaccaggttaattggctcatccattccattgcctttactgtaggatggctcgtcaagaagtgggaggtgcggttgaaagagaaggtataggttggatgatgtggaggatttggagtgcttcccccttcttcctcagtatgcatctgtttcctgcaccccactctggattcgctccctcgcccgcttcagcacttccctcggcgttctttttcttctctttccccttgccttcaccctgaatgcttcaactgttctctacctacccatgccttccagatctgcccgtcgcctgtcctaatcctgaactccagtcctatctgtctgattttaaacaagagtccccttacctcagaagaaactgtcattcatgtagtcattcaacaaacatttatagagctcctcctctgggccaggcactgctgcgtgctaggccatggtgaggaatggagtgggaaatgccatggtcttgacccccatggaacacttggtctactgtaaaacatagacttaaataatatttcctaacaaaagggagcaagtgtgcaagggctgaaaggcccctcctcttttcctaccactagatctataaagtaaccaacagtgtctcctgtagccccattacagtggattagcaaggaccaactcctccatctgaatgctgggcgccgtctcaccctcctgccgtctcaggggctttgctcagtgcatttctccttcccctcccatctcactttacctttcttgggtcctttccatcagcatccaaacaagctcagttctgtatgcacaagtatcatccaaggagacgattaaaaacttgggtttccaggccctgacaccccaccaagcaagatcttgattcagtaagcttggtgggatggcgtgggttcttcagacagtgtgatcccagaggtccctggaccaaacactgaatgatgtccatcctaacgtccccgcatcactcctcagccaccacctctccctccactctcctcctcacccccattcttttttttttttttggagatggagtgtggctctgtcgcccaggctagagtgcagtgctgcaatctcggctcactgcaacctctgcctcccaggttcaagcgattctcctgcctcagcctcctgagtagctgggactacaggcgcacaccgccacgcccagctaattttttgtattttagtagagacggggtttcattgtgttgcccaggctggactcgaactcctgagctcagacaatctacccaccttggcctcccaaagtgctgggattacgggtgtgagctaccgggcctggcccctcacccccattcttgaaggacttccccacacttgctatgtcacttctcacctcccactcacttgtttattttattttattgtattaggtaatggatgtaagcagttctgaaaaagaaatacttgtagtcctacaaggcttctcataaaacttcagcccctgattcccttgccccaattgcttcttattctgagtcctgcttcccagggttcctgttggcatttacgttcatactgcatttatctatttatttagagacaagatctcactctgtcacccaggcgggaatgcagagacaccatcatagctcactgcagcctggtactcccgggctcaagggatcctctcacctcagctttccaaagcactgggattacaggcgtgagccattgcacccggccataaattctcttactaccattacttctttgttggttgaggttttttgggttttttttcctgctttgggcatgatttattgtcttccttctaatgaaaagaaagatttaggttagaccactccccctacacacttactgtctcacattcccgctcacaattctccccaaatgactgtatcaaatttttggtgttaaactagcatttagtgtttacattatgataactataaattttacctctagtaacatttataactgggtcatataattgcattgtgatgacattataataagtataaatgacctctagtaacatttataactgggtcatataattgcattgtgatgaccatccgttcttgtaatttttgtttttctagatattaataatagcctcatttttaaaatgtccatagttttcttcatatatgtaattaattcatcccaaaacctccaccagaagtatccctgtcttttccaaacacatgaggcaatctatcagtttcacttttttcccttgagcaatcccatttggaagcctctgtccaaccagagcaatcccatttagaagcctctgtccaaccagtactggttgcttgctagatctcttgtcctgcaatctgtattcagcaacattctggaaattcccttttttcccttgtaaattcttatcttttttctggctttatttttccatcttggagcatcactttctctagaagcttcctgagagagagagtttatggtgggaaattattttaaaaccttatgcactgttagggtaatgctaagctgctgtaacaaggagatcccgaaagtggctttgaaaaacaagtttatttttctcccttgtaccagtcctaaggtaagtattataggatggtgggagctctgctccatgcagtcattcagggatcctgggtgaatatggttcttccgtcttcaacatatggtttccagtgtcatcatcatttcagcccaaggagagggaagaaaaacagtattttgtattattttatgatacagtcagtcaaagtgcagccacaagaggagaggcttacaggccctagagacaggaggcatggcactgccatgcgggaccacctgagaaagacatcaaggtagtcaggaggcagaagacaggagtgaaggaaagatttatgtctttccttttattgggtttctgtgggaaaggcaaggaaaggcagggtgaacagtttaggattggctggtttgaataattcctgtgttctttgagctatatggctgattaccacctagttgcctagtacttgactttggaatgactaaggcagataaatattgtttcctggagtatatgggccagatagaggagctatggctctggaatggttagtctgcatatcagctcatgctcctggctggaccctttgctacttttaagaattggctagccctggaaggtcctgtctctccctagctagaaaagtttgttaagatgtcaaaacatgataatatacagaaattaaaaatatatatacaagcagaaatcaaggaataggtatttactcttaaagaaatgaagtggaaattaatatgtattccttcccttcaggggcctctgactagggcttagacatgtagccctacctagctacaagagaggttgacaaatgtaacttagccatgtgcccaggaagaagagaaaaatgggcccagctgtccatagaccttatacatctgaaaatgtcttattccaccctcacatttgactcatagtttagctggttatagaattctaggatggatatgatttttctcaggattttaaaggcgttgatccactattcctagattctagattgtgaagtctgatatttagattactgacctcttgtaaaagacccattctttttattctggaggatttcagatttttaaaactacgtgttctaaaatctcatgatatggtgtcatagtatggattctttcattgtgttaggaatttgcacagtagaaagttgtatcagtcagttctgggaaattttattgcatttttttctttgataattgcctctcgtccattttctctgttctgtctttctgaaaaaatcttataatttggatgtttgacctcctgggctgacactctaattttcttatatttcttcttctgtcttccaactctgtcgttttatttttcttctggggagatttcctcagcttctaaagtcttcaaatccttctagtgaattttgaggtttttttttttcaaagagatcttttttttctctacaaccatttttaagatggcatctcttacttttttttttttttgtgggtgctatactttctcttatattgctgaggacatttgaagttggttttgctgtttgcattgtctcagttctctctggctttgcttcatagggatatttgttttggtctctatatttcaagctagagatttttctcaaatatctggtaatcccagaatgtcctttgcatttgagtgaggcactaatatgatgcctggaagctctgtgagcaggggtagggcctgtcaactggtggacttagctttagggtaatttagcagagacgtggcagtttagattgggaagatcctcaaaatgtcagtatctagtgttggctaatttctttccacaagaagaattctccagatcctgtctagagcatactagcatagctgctgaagtgctggaagctgagcaagggaataggtaatgtgggttttacatttcagggtgtaagcatttccttaattgcatagtttcagtaaaaccttttgagaggtgacagggtgctggcagccctcgctcagtctcggagcctcctcggcctcgccacccattctggctgcgcttgaggggcccttcagccccccgctgcactgtgggagaccctctctgggctggccgaggccggagccagctccctcagctttcagggaggtgtggagggagaggcacgggcgggaacccgggctgcctgcggcacttgcgggccagcactagttccaggtgggcgtggcctcggggggccccacactctgagcctcgggctggcgtggccagcacagctggccccaggcagtgaggaacttagcacccgggccagcagctgcggagggtgcgccaggttccccagcagtgccagcgggtgctgcgctccaattctcgccggacctcagctgcctccctgaggggcacggcttgggacctgcagcccgccatgcctgagcctcccccacgccgccatgggctcctgtgcagccagaacctcccagacgagcgctgccccttgctttgcggcacccggtcccatagactgcccaagggctgaggagtactggcgcacggcgtgggactgacgggcagctccatctgcggcccaggtgcgggatccactaggtgaggccagctgggctcctgagtgtagtggggacttggagaacctttatgtctagctaagggattgtaaatacaccaatcagcactctgtgtctagctcaaggtttgcaaatgcaccaatcagcaccctgtgtctagctaatctggtggggactcggagaatctttatgtctagctaagggattgtaaatacaccaatcagcactctgtgtctagctcaaggtttgtaaacacaccagtaagcaccctgtgtctagctaatctggtggggacttggagaatctttatgtctagctaagggattgtaaatacaccaatcagcaccctgtgtctcgctcaaggtttgtaaacataccaatcagcaccctgtgtatagctcaaggtttgtaaatgcaccaatcagtgctctgtggggacttggagaacttttgtgtctagctcagggattgtaaacacaccaatcagcaccttgtcaaaacagaccaatcagctctctgtaaaaccaatcggcgctctgtaaaatggaccaatcagtaggatgtgggtgccaccagataagggaataaaagcaggctgccctgagccagcagtggcaatccgcttgggtactcttctatagtgtggaaactttgttctttcactctttgtgataaatattgctgctgctcactctttgagtccacactgcgtttatgagttgtaacactcactgcgaaaatctgcagtttcactcctgaggccagtgagatcacgaacccaccagaagaaacgccgaacacatctgaacatcagaaggaacaaactcaggacacaccacttgtaagaactgtgacactcacggcgagagtccacggcttcattgttgaagtcagaccaagaacccaccaattctggatacactttcactcctgccttcagcagtgcctgggattactgatctagagtttctttggtttcagtatctccagagataaaaccctaagctgttaaaaggaagagaggtgtattcatccaagtgcttgagtggaaggagtgatctggagctgagagacagttcctagctacattgtatttcaactatccttcctgtatttagtcacatgccacacccaaatctttagaggaacccagttgcaattcccgaatctttccaggattccacagaattaataatctaccagtagttgacttactctcacccccaatggaggcctgtatgttgaagctttctctgttgtgttggagagttaccactcatctgcctattaccttcaaaaaaacaaaaatatctcctctgctgttatctctccatcgtttgtccttgtggaggtatgtgttttgttatttctctactttttattcttctatgaaatccgtaagcctccatatatacttattcttttattcattccaattggggtctaccccatcatgcaaatctgttttcaataaactaaactcacttccatattgtctctgaatccaatggacatggcccaggccatatcttacttgatctctctgcaaaaatcaattcagttaactgccatatttttctagagcctctctattctcttgacttccttgattcactttttagagttttctttctgccttagtggatgctccttctcagtctcattcatttgcgtctcctcctctatctgagtgatgcagtggccagagcttggtccagcgccctattctccaacatactctcccagacaagcgatctcagtcagcttcatggctttaaatacaatgtatatttaaatgacttccagtttcacgtcttttgatctgatttctcctctaagaactaagtgcaggtttccaactgccaacagtctcctggatatctaatgggcacaaaaagttcaaagtctaatatttccaacttccacttcatccctattcattcagataaatagaactaatttccaactctgcgtaagccccaaagctagaagttgttcttgacttcttttcgtgtcatccaccacatgcagcctttcaacacttcctattggttctacttttctaatttcaaaacatagcttgtattcatccactgaaaggtatctcccctgctaccatcctagttcaagcaataattactgctcttaattttttcactcttgccctcctacatgcccgttttcacacagcatcttttaaaaacataaatcaattttgttttctactttctcttcccttcctgaatgattaagccccagatcattaggtgaggcagagcaaagcagatatcagggttggacaggaggggagacagcagtggcccagagaaggatataagaaactgaactgggccgggtgcggtggctcacgcctgtaatcctagcactttgggaggctgaggtgggcagatcacctgaggtcaggagttcgagggcagcctggccaacatggcaaaactctgtttctactagaaatacaaaaattagctgggtgtggtagcgcatgtctgtatttccagctactcaggaggctgaggcaggagaatcccttgaacccgggaggtggaagttgcaatgagccgagatagcaccactgcactccagcctgggtgacagagcaagaaactaaattggatgaagtggacttctccacagagtggcagcctggcatgttttgtcagaatcttgtgagggtgagagggagtatggggtggagggagtatgggctgaaaatgaatgaatagaataccagtgattttgtgagacaatgttttgtctgcaatatgtattattgaagttccagaaaaaaagggaaccgaaaacatgtttaaagaaatagtagctgaaaaaattaaatttgatgaaaactataaactcacagatcccaagaactcaacaaatatcaagcaaaataaactttaaaaaatcataccaaagtacaacgtaatcaaataactaaaaatcagtgataaaagggaaatcctagaatgagctagaaaagacacattgtatagagaggagcaaagacaagcataacagacttcctgtgaaaaaccatgacaaccagaagataaagaagcaacatcattaaaatactgaaagaaaaaaatactttatcaacctagaattacacggagtaagaatattttcaatatgaagatgaaatgaaggcttttctagacaagcaaaaactggaagaccttgcctcctggaaattgactttttttttttttttttttgatacggagtttcgctcttgttgccccaggctggagcgtaatggcacgatcttggctcactgcaacctctgcctcccggtgagaggtgacagcgtgctggcagtcctcagagccctcgcttgctctcagcacctcctctgcctgggctcccactttggcggcacttgaggagcccttcagcccaccgctgcactgtgggagtccctttctgggctggccgaggccagagccggctccctcagcttgcagggaggtgtggagggagaggtgcgagcgggaaccgggactgtgcgcggcgcttgcgggccagctgcagttccaggtaggcgtgggcttggcggccccgcactcgaagcagccagcgggccctgcaggccccgggcagtgaggggcttagcacccgggccagtggctgcggagggtgtactaggtcccccagcagtgccggcccactggcgctgcactggatttctcactgggccttagctgtcttcccatggggcagggctggggacctgcagcccgccatgcctgagcctcccaccccctccatgggcttctgtgcggccggagcctccccgatgagcgccgccccctgctccagggcgcccagtcccaccgaccgcccacgggctgaggactgtgagcgcatggcgtaggactggcaggcagctccacctgcggccccggggcgggatccactgggtgaagccagctgggctcctgagtctggtgaggacgtggagagtctttatgtctagcttagggattgtaaatacaccaatcagcaccctgtgtgtagctcaggatttgtgagtacaccaatggacactctgtatctagctgctctggtagggccttggagaacctttatgtctagctcagggattgtaaatacaccaatcggcactctgtatctagctcaaggtttgtaaacacaccaatcagcaccctgtgtctagctcagggtttgtgagtgcaccaatcaacactctgtatctagctgctctcgtggggccttggagaacctttatgtctagctcagggattgtaaatacaccaatcggcactctgtatctagctcaaggtttgtaaacacaccaatcagcaccctgtgtttagctcaaagtttgtgagtgcaccaatcgacactctgtatctagctgctctggaggggccttggaggacctctgtgtccatattctgtatctaactaatctgatggggacgtggagaacctttgtatgtagctcagggattgtaaacgcaccaatcagcaccctgtcaaaacagaccactcggctctaccaatcagcaggatgtgggtggggccagataagagaataaaagcaggctgcccgagccagcagtggcaacctgcttgggtcgttttccacactgtggaaactttgttcttttgctctttgcaatagattttgctactgctcactttttgggtctacactgtttttatgatctgtaacactcaccgtaaaggtctgcagcttcactcctgaagccagcgagcccacgagcccactgagaggaaggaacaattccacacgcatgggcttaagagttgctaacactcactgtgaaggtttgcagcttcactcatgagccagcgagagcacaaacccaccagaaggaagaaactccgaacacatctgaacatcagaaggagcaaactccagacatgccaccttaagagctgtaacactcactgtgagggtctgtggcttcattcttgaagtcagtgagaccaagaacccaccaattccagacacactgggttcaagcgattttcctgcctcagcttctcgagtagctgggattacaggcatgtaattagccacaccatgcctggctaattttgtatttttagtacagatgggggttctcaattttggttaggctggtatcgaactcctggtgatctgcctgcctctgcttcccaaaatgctgggattacaggcgtgaatcgacaggcaagactgacatttttttttaaatgtaaaagttcttcaggaagaaaaaatttagatctatgcaaaaaagaatgaagtgtgctggaaatgataaatatatgggtaaaaataaaatttttttcatttaaattttaaaagataatatacttgagtaataatgaattatgaggcttatatgtagacataaaatgtatgacaacagtggtacaagggatagaaaaaggaaatggaagtgtactgtgttgagactctcatgcctttacaggaagaggaatgagctcactgggaggtagacagtgataaaggtgtatatcgtaaatcctagagcaaaggcacacaaataagaatgatatttaataagctaatggtggaaataaaatggggtcaaaaatgactcaggtcatggtgcagcggtttatgcctgtaatcctagccctttgggaggctgaggcaggtggatcacttgaggccaggagttagagaccagcctgggcaacgtggtgaaaccctgtctctactaaaaatacaaaaattagctgggcgtggtggcgcatgcctgtggttccagctactcaggaggccgaggcaggagaatcacttgaacctgggaagtggaattggcagtgagctgagatcccatcactgcactccagcctgagtgacagatcaagacgctcaaaaaacaaaacaaaacaaaaaacaaaatactgggttaattaaaaaaaaaaaaggcgaaaaatggaggaaaaggtaagaagatcagacgagaaaaatagaaaacaaatatgaagactattaaattcagggccagctacagtggttcacacttgtaattccagcactttttggggctgaggcaggaagattacttgagcccaggagttcgagacaagcccaggcaacatagggagaccccatctttacaagaaataaaaattaaaaagtaattagccaggcatcatgactcgtgcctgtgatcctagatagttcggaggctgaggcaggaggatttcttgagcttagaaagtcaaggctgcagtcagccgtgattgtgccactgcattatagcctgagtgacagagcaagactctgtctctaaaaaagaatcagacccaacgtatttataattacattaaatgtatatggtccagacaccacaattaaaaggcagagattgacacattggttaaaaaagaaagccccaaataaataatattcaaccaagaaatacattttaactaactataactacaaatagggtaaacaataggataaaaataagaggaagaaagatacggccatactgtatgttagccatgctaacatcaatttagaaaaaaattgagtgactatttcaaaatcagacaaaataggcttaagaagaggtatattattagggataaagagagacatttcataattataatcacaacacaatatttactaactacaaagggagaaaaaccagcctggatacaccttcttaatcaagtaatccaagagaacatcatcaatgatgggacacattgatattatctgtcacctgatagtatgcaaagagaagaatacagcatcacttcagtggttttcctggcaaagattaataacatgagcctaatcatgatgaaacattacaaaaactcagtttaaggaaaattctataaaataattgacctgtaatcttcaaaggttaaaagttatgaagatcaaaggaagactgaagaactgcaccagactgaagaagactaaagagacagaacaacgaaaaacaacacacgattctgaattgaactggtttactattaaagacattattagaacaactaacaaaacttgaaagggatctaaggatcaggtggcagcaatatattcatgtgaatttcttgatcttgatggctgtattatggttgcgtatgagaatatataaagtattgaaggataatgagacagattcagggaaaagggttctttgtgttatacttgttacaaaagaatttgtgattttttttttcaaaataaaaacaaagagaaattaaccagagtatgttattccagtgggtcttcattgtatttgagatgaaatttaacctttctaccatggtattttgctaaactctgagtatacccctgtcagcaaaagaaatgtgggcttatgttcttgtaaagaagagtttagaatataaagaatgtaaatacacctttgggttatgtgttgttaaaaaggcaggggtcctgcttcagagattatggttagaaaaggtctctctaccgcctcgttttctccttcagtaactacattccagccaccctggtctcctatttattcatgaatcacatcgagctcattaacaactcagggtatttgtacttatgctatcaatctgtgatgtccttctcctggcctttcaaattgctgccttcttttttttttttttttttaagatggagttttgcccttgttggccaggctggagtgcagtggtgcaatcttggctcactgcaacctccgccttccggttcaagtgattctcctgcctcagcctcctgaatagctgggattataggcatgcgccaccatgcctggctaattttgtatttttagtagagatggggtttctccatattggtcaggctggtcttgaactcccggcctcaggtgatccgcctgggattacaggcttgagccactgcgcccagcccaaatggctgccttcttatccttcagatctcagttcatatgtcagttcctcagagagaccttttctgactccagtatctaaagcagcaccactgctttctttaacagcacttaagccaatgtgtatttatattttatgttgtagctctcttctttactaaattataagcccatatcccttttgctgacaggagtatgcccagagtttagtaaaataccaggtacatgttaagccctcaataactgaataaataaatgaataagaagtactgagtatatgtgaaagtaacactatactaaacctgcaaattcatctttaacccattcccaccaccttatttgttctccacctcaggctctgagaataccacagccttcacaaaaggctccgacaccaccacagcctccatcacaggctctgagaccaccatggcctccaccatggcctctactacggccttaactacaggctctaagatcaccacagactctaccacaggctctgagacaacctcagcctccaccatggcttctactgcagccttcaccacaggctctgagaccaacacggcctccaccacagactcagggactactatagcctccactaggaccttcaccacaggctctgacacaaccacaggctccactgcaggctctgaaactatcgtggcctccaccacagtctctgggaccacaacaacctttactatagcctccactacagtccctgagactaccatggcctccagcacaacctccactgcaggctctgagaaaacgatggcctcctccataatttctgagaccaccatggcctccaccacaggctctgagactgccacagtctctaccacaggctctgagaccaccaccacctccactgcaagctctgaggccactaaagtctctaccacaggctctgaaaccaccacagcatctactgcaggttctgagaccaccactacctccacctccatggcaggctctgaggccaccacaacctcaactgcagactccaaggtgatcacggcatccagcatgagctctgagaccactgtggcccccgctgcaggctctaacaccaccacagcctctaccacaggctctgagaccactacaatcctgattaaagcctctgagaccaccacagcctctacagcaggttctgagaccaccaccccctcccccacaggctctcagaccaccatagtctctatttcaggttctgagatcaccaccacctctacggcaggatccgagaacaccacagtctctagtgcaggctctgggaccaccacagcttctatggcaggctctgagaccaccgtctccactgcaggctctgagaccactacagtctctatcacaggcactgagaccaccatggtctctgccatgggctcagagaccaccacaaactctactacaagctctgagaccaccgtcacctctactgcaggctctgagaccaccacagtctccaccgtgggctctgagaccaccacagcctatactgcagattctgagaccactgcagcctctaccacaggctctgagatgaccacagtcttcactgcaggctcggaaaccatcacaccctctactgcaggctcagagaccaccacagtctctactgcaggctctgagaccactacagtctccaccacaggctctgagaccacaacagcctctactgcacattctgagacgactgcagcctccaccatgggctctgagaccaccaaagtctcaactgcaggctctgagaccacagtctccactgcaggctctgagaccactgcagcctctactgaagattctgaaaccaacacagcatttactgaagattctaagactaccacagcctctactacagggtttgagacaaccgcagcctctactacaggctctgagcctaccatggcatccaccatgggctctgagaccactatggcctctaccataggccctgagaccaccaaggtctccactgcaagctctgaggtgaccacagtctttgctgcaggctctgagacaatcagagcctctaccgtaggctctgagaccaccacagtctctaccacaggctctgagaccaccacagcctccatcatgggctctgagaccagcacagattctaccacaggctctgagaccaccacagcctctactgaaggctctgagaccaccacagcttccactgaaggctctgaggccactacagtctccaccacaggctctgagaccactacagtttctatcacagactcagagaccaccaccacctgtactgaaggctctgagatgactgcagtctccaccacagtctttgagaccactacagcctctactgaaggctctgagatcacaatagcctctacttcagactctgagaccaccacagcttctactgaaggttctgagaccactacagtcactaccgcaggctctgagaccaaaacagcctatactacaggctctgagaccaccacagcctctaatacaggcttggagaccaccacagtctttaccataggctctgacaccaccacagcctctactgaaggctctgagaccactgcagtctctgccacaggctctgagatgaccacagtctctactgaaggctctgagaacactacagtctccaccacaggctctgagaccactacagtttccaccacaggcttggagaccaccaccacttccactgaaggctctgagatgactacagtctccaccacaggtgctgagaccaccacagactctactgaaggctctgggaccactgcagcctccactgcaggctctgagaccaccacagtctctactgcagattctgagaacaccacagcatctactgcagattctgagaccacctcagcctctactacaggctctgagaccaccacagcctctactacaagctctgagaccaccacagcctctactgaaggctctgagaccactacagtctccaccacagactctgagaccaccatggtctctaccacaggctctgagaggaccatcacctctactgaaggctctgagaccactacagtatctgccacaggctctgagaccacagtctctactgaaggctctgggaccactacagtctccatcacaggctctgagaccactaaagtttctaccacaggttcagagaccaccaccacttctactgaaggctctgagattactacagcctccatcacaggctctgagaccaccacagcctctactgaaggctccgagaccaccacagcctctactgaaggctccgagaccacctcagcctctactacaggctctgagaccaccacagcctctactacaagctctgagaccaccatggcatccatcatgggctctgagaccactatggcctctaccataggctctgagaccaccaaggtctccactgcaagctctaaaatgaccacagtcttcactgaaaactctgagaccaccatagcctctaccacagcctctgagaccaccacagtctccactgcaggctctgagaccatcccagcctctacagcaggctctgagaccaccaccaccacctctactgaaggctctgagaccactacagcctctactgaaggctctgagaccaccacagcctctactgaaagctctgagaccactacagccactaccataggctctgagaccaccacagcctctactgaaggctctgagactaccaccacctctactgaaggctctgagaccaccacagcctctactgaaggctctgagatcactacagtttctaccacaggctctgagaccaccacagcctctactgaaggctctgagaccaccacagcctctactgaaggctctgagctcactacagtttctaccacaggctctgagaccatcacagtctctgctgaaggctctgagaccactacagtcactactatgggctctgagaccaccacggcctctactgcaggctcagagaccaccacagtctctactgcaggctctgagaccaccacagcctctattgaaggctctgagaccactacagtctcctccacaggctctgagaccaccacagtctctaccacaggcactgagactaccatcacctctactgaaggttcagagaccactacagtcactactgcaggttctgagaccacagcagtctataccacaggctctgagactaccaccacctctactgaaggctctgagacaaccacagtctctaccacgggctctgagaccaccacagcctctaccgcagatttggagaccaccacagtctccacctcaggctctgggaccaccacagcctctaccgcaggctctgagaccacaacagtctatatcacaggctctaagactaccaccgcctctactgaaggctctgaggccactacagtttctaccactagctctgagaccaccacagcctctaccacaggctctgagatgactacagtctttaccacagtctctgagaccaccacagtctctaccataggctctgaggccaccacatcctctgctgcaggctctgaggccaccaccacctctactgaaggctctgagaccaccacagcctccactgcaggctctgagaccaccacagcctccactgcaggctctgagaccaccacagcctccacttcaggctctgagaccaacacagcctgtaccacaggttctgagacctccacaccctccagtgcaggctctgagaccaacactgccttcatcataggctctgagagcaccatagcttccactgcaagcttggagcccactgcaacttccctcacaggctctgagaccaccacagtctctatcacagcttctggggccactgcagcctccaccactgtctcttccaccacgtttgtactcaccaaggccactgacgtttctatccagcccatcaccaacacacctatgtcaggtactaacccccatgtcttctttgagcccacacattttaactccagtggcaaccaccagctgttcacctgtttctatcatctctgccctggttcaagtcaagccagcacacagttagatataatttcctcttctaggctgggcgcggtggctcatgcctgtaatcccagcacattggaaggctgaggcgagcgaatcacgagatcaggagattgagaccatcctggctaacacggtgaaatccagtctctactaaaaatacaaaaaattagctgggcgtggtggcgggcacctgtagtcccagctactcggaaggctgaggcaggagaatgatgtgaatccgggaggtggagcttgcagtgagcagagatcgcgccattgcattccagcctgggcgacagagcgagactccgtctcaaaaaaaaaaaaaaaaatgtcctcttctggaatcctaattgcctctactctggtctcacctctttttttttaagtgcccaccacttccattgcaatcagaaccacaatatagtaaaccacaagtgcatcatatctgtcacatcttcctccagcaagcccgcctcaactctactggcccatcacagttttgtgaaatgctcccacttcggtgccaagtagattatctctattcaaccaaccatctgtgacactgccacctcctatcaatgtattgactctagaccagaggctggcagaccacatttcatgggtcaagtctcacctgttacctggttttgtaaagttttactggaacatagtcatgcccattcatttatggtttgtctccagctgcttttctgcttttccgtgtatttgcaacagagacagcctggcccaaaagcctaaattatttgctgtttggacctttacagaaaaaatttggcaacctttgctccagtctgagaccaaacaattttgttcattctctggcacttgccatcagcaagccggttacatctgattctatcctcttggttctaagcatactcacttctattctcatgactggtgctgtttgtgatcccattttaaccacttctgacctaggcacacccatcgctacctaagccgccaccaccgcctctgctgtgttgattcgtgctcacacctgtctgagcccaccctctcctatccctgtgagcagccttctccacttgggtcaggtcctcctacatctgcccaagcacactcacctcacctttgctgatcaccacagtgtggtagatgatgtcacctctgtcccagccacggccactggcatgcccatgagtgaatccaattctaccatctcctcctccagctccctccttacacccagtgatcacagtcacaaaagaagcagggcctgccgctttgtataccagcccacccacttatttgatctgctttgatttatttattttcaattttttccataagttattgggatgcaggtggtatttggttatatgaataagttctttagtggtgatttgtgagattttggtgcacccatcaccctagtagtatacactgcaccatatttgaagtcttttatccctcgccccctcccactcttcccccaaagtccccaaagtccattgcatcattcttatgtcttcgtatttccatagcttagctcccacatatcagtgagaacatacgatgttcggttttccattcctgagttacttcacttagaagaatagtctaaaatctcatccaggtcactgcaaatgctgttaattcattcatttttatcagcccaccctcttctatttgggtggccacttctgaagtcaaatagatcttccacttctgaacccatcgcgataacgtttcctcaaacttctgcctcctccatcaccaactccaccaggtgacacattctacctccttctctgtatgacacccacctgcattctggggacatggccacagcagaatcgctttctaccatctctcctcccccaccacacctctcctgagccacctccaccataggtttgttagattcaccctcctctggtctaagcacccccattcccctttaatcatctctgctacaaatgcatcatcttgtgtgacctgtttcataggcaccagaaccactggaaccagactcactgcctccagctctgtcaccatggcccctggaatggacttcacggcctctgctgccagccatactgtgccaggaatagtcttaaacacctctggcctgggtacatccactatgggagcatcatctaccacctcagcccacggcgtcaggaccaccacaggatccacccgtgagccaaccagcagcaccttccaggaaacaggcccggtgtccatgggcacaaacacagttagcatgagccacacacccacaaacgtgatcaaaccaagtggatatttacagccctgggctatcatcctcatttccctggctgcagttgtggctgctgttggattgtcagtaggactgagtttttgtctggtgagtacccagggtgggttcataggggagcctggcaagaaggcaggggggaatcatgtcagcagtgctttggaaaaatccagaatgagaaaggggagtaagttggtgcgctcagaaggaaagaatcacctagcctgatataaggaccagagagaatgcttaagtcagagaaagtgagaagcaaagtagaaaaagaggagggaaaagatggagttggggccaaagtgaagggaaatactgacagaacaagggaaatactgagagagaacaaggaggacataaacataaagaaagcaagaagcagctgggcgcagtggctcacccctgtaattccagcactttggaaggccaaggagggcggatcacttgagtccaggcatttgagaccagcctggccaacatggtgaaacttgtctttactaaaaatacaaaaattagtcgagagtggtagcatggacctgtagtcccagctactttggaggctgaggcacgagaattgcttgaacctgggagatggaggttgcagtgagcagagatcgtgccactgcactccagcctgagtgacagagcaagatcctgtctcgaaaggaaggaagaaagaaaagaaaggtaggaaggaaggaaggagagagagagagaaaaagagaaagaatgaggaagaaaggaagaaagcaagaaagagaaagaaaggaagaaagaaagaaagaaactgagagagaaagagaaagaaaaaagaaagaaggaaagaaagagagagagaaatagagaaaagaaagaagcataaaaatgttcagccatccaaaatgcgggcttccgattgtctcatgtatgacaaatttctggtcctcacagcaattccttgtgtggcctgtgactgttactctctgacctcccactccatctctgctctctggtcttgattgttctttgaatacatatttttcttacatcgatttcacatttattgatgttcttcctgttttcttgtgatcctgcgggtaagttaccatttgaggagtgaagcagagtataaatcagtggtgtgctggagctggctcatcctggcccacaagagattgtgcagttcttcccaattctgagctgagtgatgtgacactggtagcttaaaatatgctgggttggaaatacttacaccacagcaattgtcaaacactacaaatcagcacttttccctcggagagcctgttattaagtgttggacagcataccactggtaaaaatggacaaaatgaaaaatacggaagtcacaaaagatttggataatatagtcaatttgctgaggttctttgttttagaattctcagcctctctccgtatgtggactacataataaataccagcatctaagaattactccctaaattactttattatttcatttgcaagatcaagagagaataacgaaagtgaacattgagtttttactgcctgctaggctcaaggctgaatgtttaaaatgcataatgttatttaatctggcctacaatcccgtggccatattatattcatcttacaagtaagggatctggagcttcatgatcttagctatttgccccagcacatgtagtgagtggcagatataagactctaactcaggttagttggattctggagttcatgcctataatctcaaggctctgtgtagacagctttctagagctctcaattccacgtacctgttctgagctttcttagctgactaacaaagagaaagactgtctgtaaagtgagtctctgtgcctttcacataggggtatggatttacctttgtcttggaagtccaaaaacacataaccttatgatctgcagagctagggcctgagtacgcacataaagatgatatgttaataaggtaacaaggaagcttattttgtcagacggagaaagagtaaaagaacaaggaaaaagagagacagagacagagatcatagtaaggatggtggtaaagagaagagaacatgggcagtttggaaaagtgaaaatctgacattggtgaaacaggcatgtatggtgattagggagaggagacttaattttcatttatcaatgtatttatttttttcttttagagaaaccttttcttccccctgagatattgtggtatttattacccccatggccacagccacagccttggtctggacctgaacttgggcctgggctctgggacattccacagcctgggaaatgcactggttcatggaggagaacttgaaatgggacatggaggaacacacggctttggatatggagtgggccatggactgagccacatccatggagatggctacggagtgaatcatggcgggcattatggacatggaggaggccactgaggacaccatggagtggatcacagagggagccaccaaggaggccacggcaggacaagatggctgtggccatagattgggtatcaaaacatattatgggtgggagggggtcatggaggagaaaaaaataatgatcatgaaataattaaaatggagcataggaagcttcccaggatgtgatccatggagatggacatggactaggtcaagaaaagaaccagcaaaaggacctcagagactttgactggcttggaggggacttcaagtcaaagcttctgtgagtttttcctgagtctcagcctctgttgtggggagtcacgacaaccaccctcaggacatcttctctcccatttcccgccacatcagggtcaacgtttctcatccctgtgtttcctcatggtgctataaatattaccaagacatgtctaagaaacaaaagcacataatgaatgtattatcagggccacacacgtattcgttttcctgtttgttctttcaggttttgttttttttttttttttttgagtgcttattatgtaccaatcactatcccaggagcctttaaatacgtcatcatttggctgggtgtggtggctcacgcctgtaatcccagcactttgggaggccaatgcgggtggatcacttgaggtcaggagttcgagaccagcctggccaacatggtgaaaccccgtctctactaaataaatacaaaaatcagccaggcgtggtggcgagtgcctataatcccagctactcgggatgctgaggcaggagaatcggttgaatctgggaggtggaggttgcagtgaggcgagattgtgccactgcactccagcctgggcgacagaggaagactctgtctcaaaaaaaaaaaaaaggtcatcatttaatcctcagaaaatatcttggtgaccttgaggtaggcaaagatacttagatacttaagcaagacacaaaaagcactagctattaaaagaaagtgtgatgatttggacttcattaaagcctagtatcagcatatacctttaagaggtatattcttaactataaaaggaaagtcaaagatgggagaagatattgcaacacatatagctaacaaacgactcatatccagaatgcagaaagagctacaataagaaaaagatgatgcaattttaaattgggcaaaatatttgataaatagttagcaaaagaggatatcaaaacagccggtgaacatttgaaaaggtacccaatatcactgcttatcagaagtggaatgtaaaaccgcaatgagataccactacatacacacactgtaatgactagcatttgaaagactgccagtaccaagtattggaaaggacattgaacaactggaactctcacacattgttagtgggagtgtaaattgatacaattatcttgggaaaatgtttggcaatgctaaaattaaacacataccctatgactcggtacttccactcctgagagtaaatatccagcagaaatgaatacctgtgtccaccaaaagacatgtaccatgccagcttcattcataccactgcagggtggaaatttaaccccaaagtccactaacattagaacaggtaagtaaattgtgacatattcatgcagtggaatgctacccagtagtgaaaaaaaaaacctatgaaatcacacaataacattaatgaatctcatagtcagtgttgagtaaaagaagtcaaaacaaaagtgtacctactgtataattccattcacatgcagttcaaggccatgtgacattaacctgttgtaataaaggtcagagttgaggatgccttgggggaaaaggctgaccgggagaaggcatgagaaagccttcttgcaggggcagacaggggaagctgagaatgttctgtgtatgatctgggtggtgattacaagggtgtatagatatgtaaaacttcattaaaatgtgcacatgagatctgtgcactttatggtatgtaagttatgtctcaatttgaaaaatgaaaaagatattctgaggctattttctcagcatattatgatttccttggtcagagaatgtggttggagacacatgacgataaatgaggcatttggtaagcccaaagacagtggtgctgcaggaagcattgtgtgcaagggaggcaagcagctattttcaatgaggacaaatcacctctctctttaggttgaaataggtctgatataattaatctgccattctctctggagaatggtgccacataacggggccaacactgatctctgctgttagcagttgaggcactcagccatggattatctgtccagcttggccttggtgaggggaaggccagctcactgagccttgcatacgcttcatccctgccagcctgtctgctttgtccatgtccctgctgagcgagcactagagcagctggaaaaagagattggctgacgtctgcagaatggatcgcttggtcaacctcatcatggaagatttcctctgtagtgaacgcccattggtgaacagtcacatgggatgcacatactctcaccatctgtgcccttcccaagagactcgtccaccttcctctttcccagacttccttgtcatcaattcaccatgtctttcctcaccctgagttatctagccaaactgttagccactgcctattgatcagggttaactgtaactggtcatctctttgcccaggcaaagtaaacaaagcagatgcattctttacaattcggatcactgggagaattttccttccccactgtcctgcagggctgccgtgagtggggtggtaatgctgcagcagcctgctctctgtggtgttagaatagcatgcagaaccacccacacaccagaggaaaccaaatctttcctttctcagtcaactagacataggaaacccttcatgtgactgtgattatggagagagaggttaggaatgtagctggagatgccactggagttacagctgcctactcatgcctcttacttgtgccttgaggaactaactcagccaaattcgcaggcaccacttccattcaaggaggtgagcactgctaagtatgcccagtctagtgtggtggtgcagacaacacccagttcataaagggcagctcatgtttcatgaaccctcgcatgctgaggacccaagattaagtcagatgctaggatgtggaagagggcttgcttttgctccaaaactctggggacctgtgccgtggctcttctactagctacccagtgtctccacacagctttctgatgtaccacagacattttaggcaacattggatctagtcagcaatgtctcaagcagccttatggccttgctttggttcccacttgaaagtggggaaatatgcgcagacggagcctagagatgaactttgagtaagatgttatttatgttcttttttttttgagatggagtcttgctctgtcgcccaggctggaatagtggcacgatcttggctcactgcaacctccgcctcccgcctcccgggttcaagcgattctcctgtctcaacctctcgagtaggtggaactacaggcgcctgccaccatgcctggctaattttcgtatctttagtagagccaggtttttaccttgttggtcaggctggtctcaaacttctgacctcaagtaatccacctgccttggccccacaaagtgctaggattgccggcatgaaccactgtgcccggccacgtcatttatgttctaagccccataagctccaccctgacttgtagatcgcaatgatgtcttgtatgttaccctaaaggtttgggtgttttcatttccccattgcactgtcacgatgataaatggctgagattccttttgaaagctaggaggaagattcgcggcacatcctggtggtggtggtggatcttgctgccttcccttcatttctaggtctgtgaacaggttcgggcctgggaattaggtgagagtctgtggcaactcaagtcagctctctgttcaaccacctggatattttcacttatatagatcaagtaagattttagtggttaattgattaatgattaattagccatagccaaagagccctgattacagctctggtcgtgatgcccacatcgataatcatgcctgtcttgtctctggagggaaagccctaccacctacctactgtttcctgaagattccaccatgcccactgaaatcaggaagctcatttcaatggtcagatcatccaccattgcatttagcaaagagctgctacagagcttttcaacgatgctggtcctctcccttctaatgccttgatgaagacagtttcaatggaaccttctgggaggacgtaatgaaagagtgagtgagcaagttgcacatattaaatccattccaacataactctcttcctaagtcttttgatttttttcttccgcttatactaatgaaatactgggatctcaactttatttagtgtaggccaccactaagtccacatttcaagcaaccgagagaactattagtgcaactcacacctacttgagctaatgttttgaatctagaacatgtgataagttcacccatgtatttgttttctatcagtgataacttactacaaatgcagcagcttaaaccaacacccatttatcagaccacagttctatgaggcgggtctggggccagcatgactgactcctttgctcagtctcacaggttaaaatgaaggtgttagttgagctgcatcctcatctggaggctggcatctctttcaagctcacgtggttgtggcagagtccagttccttgtgtttagagttgaggcccctgtttccttgctcactgtcatctatggttgttttcagcccctagatctgactcaacgcatggagctggaggccacgaggggcattgtaatagggcctgtggtaggcagaataacagcccctcaaaaacatccacgtttcaattcccagaacctggaaatatgttactttatatggcaaaagggactctgcatgcatgatcgcattaaggatcttgtaatggggagattatcctggattatctgtatgggcccaatgtgatcacaaaggtccttataagagggagatgagaggccgggcgcagtgactcacacctgtaatctcagcacttagggaggctgaggagggtagatcacgaggtcaggagttcgagaccagcctggtcaagatgatgaaaccctgtctctactaaaaatacaaaatgtagccgggtgtagtggtgggtgcctgtaatcccagcctctcagggggctgaggcaggagaatggcttgaacccaggaggtggaggttgcagtgagccaagattgcaccactgcactctagcctgggcaacagggcaagactcaatctcaaaaaaaaaaaaaaaaagagggagacaggagtcagagtcagagagatttgaagatgctgcgatgcaagctttgaagatggaagaaggggccacaaaccaaggagtgctggaagcctctagcggtggaaaaggtgagtaaacagattcttctctagagcctccagaaggaccacagaccagctgacaccttgactttagcccagtaaaacctattttaaacttccgatctccagaactgcaagataatatatttgtgctatcttcagcctgaatttgtggtaatttgtcacgcagcaataagaaactaatacagggcctgaggaaaatctgtgtccccttgccaagggagtgctgtgagggcgtcactatagggtcttcaggcaagagaaagtgacttcctcacagaggggaggaggggctacttctgctggcaaggaaagctctgcgggatttggaggttcaaagtttttcagactcatcaaaatctacccaggtgtctccactccaattctgggcttccgttaacaaatattccaaatgtcacacacgagactggcaaagatataaatgcaagttgaatataattctccaatctgcagaatcaaactgtgggtctggttttttcatacatagtccctgtggctttgagagataagcatgtcttttagaatattcagagaaagctctgtgttcgctggcaatgccttgactgaggatgcagcagaggggtcatttttttcctgtaatctcccagtgcagccacccacagtcccggcagtcaacactcccagcttcacgatctgtcacagcgaccacctgggctcccggcccttcccttcaacaattgctttattccaggcaccaccacaggtgataacttaagtcactttttctatcttttgctgtgtaatacaaagacttcattttatactagcatgaggtcgcccctgccctcaagcctaatgggtcagggaaccaatcccagattgccacctttgaacgtcaattttctgaaacctcttgttataccaaatactgtaacagtcagagttcacttatgaaaacagaaaccactttggatatttcaagcataaaaggatttagtacaagaagtagatgtttataaaaccactcgaaaaggtggtgtgccgcccattgcttcccattctatacacagtgattcacgctggtcacacgcagtcagctctggcgggtgcatttgcaccacgagaagtgagttgttaaacatttaccagcacacacgctgcaggggacctaaggagagtgatggcactggaaagaggaatgctcctgcttctaatcctccttgatagaggcgctccccttttgtttttgaagaatttatagaagcttttccaccggggagcttcagctaggtcttctcatcagtgctgtgtgccagacaagccagatgatcaaggaagtacctacactttggacactgtcagtttgcctggggactgagagcttacagtccaagcttgcttcaactctggctgaggccaacagagagagcccaaagacaactgaaggagcggcagaaaacaaatatgggaacggggtaattggcttccagttccttcattcgcaggtcatgaaaaaaacctggggctagactccatgagagtttttttgttttctgttttgtttgtttgtctgtttgtttgtttgagactgagtctcgctctgtcacccaggctggagtgcagtggcgcgatctcggctcactacaagctccgcttcccaggttcacgccattctcctgcctcagcctcccgagtagctgggactacaggcgcccgccaccacgccctgctaattgttttgtatttttcgtagagacagggtttcactgtgttagccaggatggtctcgatctcctgaccttgtgatccacccgcctcagcctcccaaagtgctgggattacaggcgcgagccaccgtgcccggcctgttttctgtttttttgagacagggtcttgctctgttgcccaggcccttgaactattccacttcccactcctccccaggcccttcctaatgggactaagtcatcctccaccctcacctaccttctggctgctgtaccctcctctctaagcttggggattctgccactgctcacagctggaagaacaacagcctacatgtccaggccttgcccagtccagatgatgctttaaaggccttcttcttcttcctttttttttttttttttttttgagatggagtctcactctgttgcccaggctggagtgcaatggcgtggtctcagctcactgcaacctctgcctcctgggctcaagcgattctcccgcctcagcctcccaagcaactgggactacaggcatgtgccaccacaccaagctaatttttgtatttttagtagtgatggcgtttcactatgttggccaggctggtctcgaactactgacctcgtaatctgcctatcttggcctcccaaagttctgggattacaggcatgagccactgtacccgccctaaaggccttctttgaaagagaaaaagaagaggtggcattctgtgaaggaacatcaaggaccagacatccagcttcccctgcagcccaggtccccctagcggtgcttctcttcagattgaggacctattctttggagttccgaattcctagtagtccagccctcagatctccaccttgagactccaccctcaagattctcattttctgcctttcccttctaaggcttaatcccatcgggactaagggaggagccttcccttccagcctcacacaggcagactatctcaaaagaaagagaaagcaattttcccttgcatgctggctgtttcacttccttctacttttaggaaatggtgagtgattttgtttaaaagagaataatcttggagtttgagtagagtttggggaaagtgttgacaacttctgggacacacactctgtccttgttgcccccattctcttcaaggcaggagggatgattattttgcttctttctctccaatgcaacccagcatctgtcctccgttctgttctcagtggcaactcttctgcccagaagatggacctatttactctataatacatcattcccagatataggcgcattagagttggaagagaacttgaattagtgtctgaccacccgtaataggcagggatctatttccagcgtctctgacagcagtcatctagcctctaattaaacacttcatgagacattgctgttccacactcacgcagatttaattctctctagaatctgccccagcatggctttgactcttgtgttttatgcccctgaccaacacaaaaccagtctattccctctccacaggccagcttttcatctcaacttctcacttagtttctctcttggctctgaccctaacctaaggcatcgacacacagttttgggattcttccctcaaatctaaattggcaatccttatgttagtccagacaacaccaaggcaagaacatatgtggagggtgaagggcagcacctacatccagggagagaacagggccatcgatgaggagagggtctatagggatctgggaggtcaagggcttggttgttaatgggatggaaaatcagaacagggtagaaaataggcatgacagggaaagaagctcagtctcaccttaactctaactgatccaacaagaaagctgagccactttcctgaatcccagaagatcttatttcttcaagctgacatgactgattctttactagtccatgtgtcaagaccatctggggtcccttaaaccagtggctcccaaactattttttttttttgagacagagtcttgctccgtcgcccaggctggagtgcagtggcgtgctctcagctcattgcaacctccaccttccaggctcaagcgattctcgtgcctcaacctcccgagtagctgggattacaggtgtgcaccaccatgcttgtctaatttttttgtatgtgtagtagagacagggtttctccatgttgtccaggctggtcgagactcctggcctcaagtgatcctcctgtcttggcctcccaaagtgctgggattacaggtgtgagccactgcgcccagccccaaacttttgtgttcagaagaattacccgatgtagtaaaaatgcacatcatggtcccctcccaaaccgattccgcttgattatctgccccctagaggaagggcacaatactgtttggagaggagcttgatgggccttcaacttttctcttacgttctttagtcggagagtatcatgaatagttaaaagaataacaccatcccctgtaaaccctggtcttgtaactcccccatacctgggatatggaataatgcatgggttaagggctttaggggctggctctggggtcagactgccttgatttaaatcgttgttccactacctactaactgtctgacctggaactagctgcttaacttctctaaacctcaatttacctatctataaaatgggggtaatattagtttctatctcaaggaggtattgtaaggattttagtactaatttatatgtggcacttagcacagtgcctggaatatagtgagcattcttaaatgacagccactattattatcactagtattactcatagtagcggtagtggtgaacaaaaccaaatttccagtggagccaaccagccaccctttcttaaccagctgtaacttccagtgaaatcaccacgatcatccccccagattaaccccaccttccagtggaatcactgtgaccacccctccaggatcaaccacaccatccagcgaaattactgtgaacactgccctggaccaaccacaccttccagtggaatcaccatgaccacccctccaggatcaaccacattatccagcagaatcaccgtgaccacgctccctggaccaaccacacctcccagtggaatcactacaacccccctgccctgggtccactatatcttccagtggaactaacacaacaaccgcaacctccagtgtcaccagcacaagtgcagcccctccagggaatgagggaaggtctaatggatgcctgaggctgtgggaagtcatcctagtcactctggccttggttgcaatggctgtgattctcttcacagggctcttttatttcatgagtgcctgatgtgtgggaaatcctttttctgagggagggagtgcagggaactgaggagggaagcagggtagagagagtagggtcattgtgtggctaatagggaatgagaaatcaggagagggacaaagcaagacagagacagcaggtgagaaccagcaagagagagggctagaaaagctggtacatgttcagaggaaattgatgaggagagaaggggccaaaggagtactgaggctggggaggccgaatggggagtggggacacgtgggatgggagagcactggaagaggggcataactctgaaccatccatccttttgttttctagagaaactctctgtgcctaagaaacctcttcaccaaagatcttcacatcccaaaccttggtccatgtcctcaaggatatcatggagtccaagatgggtcaagtgagactgaaacggattttagagaccagtgttctcccacaggcatggagctgatgaggagacacagtgtccctaaaggcaggcacttcactgtcctcagggtggggaggaccagcggtctcggttttcctcacttgcccccagggctgctcctcccagctctgctccagcccctgacactcctaccttctgtttagttctcccagacctgaaacaggaggctatcgctagtgctgaatgattaaataagtgcatctgctctatgtgacagccagactgtgggtgtgtgcttgtatattgctgtgaagagaggtttcctatatcatgaggacactctttcgctgtgacctcccagttctcaaatcctagcatgaaatccagagacctcacatctgtcccattttcttccccactccttccctgctccccgaggcctctgggtcgatggaagaacggagtcaggagagatgggggaaggcaggtgctggtctttacagacgtgtgttgcatggcaggaaaacagcctctgcgtgagcctagaacatgaactggaggaaagtgatcctgttttcatgttgtgaggtaggaaagagcttgctactggggccacccttagacatggccacttttcctggccactcacgtctgctctgggctgcaggtgtgagttgccacctttctctcctgtgggctcccagcccagcaactgtcctgggcagggagaatgtgctcccagtttttgcaagggcaggactggcttgccctgctacggtctagatcctcagcagctcccccaaaaccaggcctcagagggcacacatgccagtgtcagcaccatgctcaggcctggtcccacccaggcttctggtgcaacttgctctcgcactcgcacacgcaccccactgattcttcctccctgtgaatcactcgcctctgctttatcagtttcaccctctgctaagtctcttcagcttctgggattctcctgggtctttgggagagccttaacaggaccaagctgtttctctaagaacattttacaatatgatgaacaaaactgtttttaggctgggtgcggtggctcatgatgcctgtaatcttagcattttgggaggctgaggcgggcggatcgcctgaggtcaggagttcaaaaccagccctgccaacatggcaaaaccccgtctctactaaaaatacaaaaattagccgggtgtggtggcacatgcctgtagtttcagctactcgggaagctgaggtgggaggattgcttgaacctgggaggcggaggttgcagtgagcagagattgcgctactgcactccactgtgggcaacagagaaagactctgtctccaaaacaaaacaaacaaaaaacataacaacaacaacaaaatctatttttaacagatgcaagagagtatctactgtacaatttatttgcatgaaattcaacaataggcaaaactaatctatggtggcagagatcagatctcctatgagggtgagggtttttaggaagggggcactttctgggtgataggaatgttttctatatcaactggtctgttggttacacaggtaaatacacttgtcaaaactcagctaacagctgggtgtggtggctgacgcttgtaattccagcactttgggaggctgaggtgaaaggattgcttcagcccaagagtttgagaccagcctgggcaacatggcaagacctcatctctacaaaacatacaaatattagtcgggtatagtaatgcacacctgtagttctagctacttgggaggctgaggtgggatgattgcttgagcccaggaggtcaaggctgcagtgagccgtgatggtgccactgcactccaacccgggcaacagagtgagaccctgtctcaaaaaaacaaaacaaaacaagaaacctccactaactgaattcttaagatctgtgcatttcactttttgtaaattttacctcaataggaagaaaaaatgtatattcgggttttttattttgggattttttaatttttatttttatattagggttttaaaataataccttgaagatatttatcagtgtatccattatctcctcttcagttttaagagcccccagaccttttcgtaaaataattatcatcttttgcactcattttttcattcattcattcaccatatttactggacacctgcttggcatgaggtctcaaggagctggggcagctaggatgaccctgtaggtcacagttgggtgagggaggtacataagttacaggccaacgcatcaagtagtatgaatggaagcaccacaggaggaaacatctaacttgatgaggggaggagaggctgactcacatagaaggtgacatttggattttgaggagttagcaggcatttacgaggagcagaagaggaaatgccaggcaagcaagcagcttgtgcaagactgggcatggcacggccagtgaaggtcagaagacctgtggggctggagagcacagcagagggagctggggctgggggctaatgcgtggctttgaacaccactccaaggaggccagatttcatcctttaacagcacaaagcccacagatcactttaaggtgtagtgggacacaattttttccccaataagaacacttcaatcagctgagtgagtagaaaatagaggctggaaaccagcaaaaatggtgttgtaatgcccctgcaaagaaagaagcaaatagacaaatctaagaccacaaaacatggaaatgggaaagaagaaaagaagtggaggctgggcacagtagctcatgcctgtaatcctaacactttgggaggccaaagtgggaaaactgtttgagcccaggagtttgagaccagcctgggcaacagagtgaggtcctgtctctacaaaaagttaaaaagattagccaggtgtggtggtgcacacctgtagtcccagctgaggtgggaggataacttgagcccagggggtcaagccttcactgagctgtgattgcgccactcactccagcctgggtaacagagtgagaccctgtctcaaaaaaaaaaaaaaaaaaaaaaacgaaaacgagaagaaatgtgaatttcaagagatttctgcctagcacttttttaaaaatccccaactccagaatttatggtgacttttgttaaaagtcctgttttagggaggtcttcatctaacgagctctaggcaattttcttaaaactaattcatcaaatgactaattctttgaatttttaaattttgtttaaatcctattcagtgtgattccctcctgctgcaggctggaggctgggagacagagggagactggggaatgtcttcttgatttatagcatgttttctagttaagaaaatactcaagataaatatatttatttataacaattttcacatgaaagactttattcaaaaatatgtgcaagaaaaaattatttattcttgactctgatgaataattgcaaatatgattcctatgaatagtatataaattatatctaaaactataaggctacagactatacgattcccttcatatgacattctgaaaatggcaaaattatagggaaagaaacaagatccatgttgccagggtttgggaagtgggagaagggttggctctaaaggaacggcatggggggagattgaggaggatgaagggattcagtgcgccgaatatgtgactctaccatttatcaaaatccatagaactgtacactacaaaaagtgatttttagggtatggaaattcagcaaatcaaccaggatgtggagggaaagatggaaagcagactctgacaaatgactcatgtaagcacagtgaaacggatggagaagaaggagctggcctaagtaactttgaaaaactgttttgagtcaggcatggtggctcatgcctgtaatcctaccactttgggaggccaaggcaggaggcttgtttgagtccaggagcttgagatcagcctcagcaacacagcgagaaccccgcctctacaaaaagttaaaaaaattagctgggcatgatggtgtgcctgtagtcctagctgctcaggaggctaggatggagggatcgcttgagtccaggagatcaaggctgcagtgctactgcaccccagactgggtgacagagcaagaccctgtctcaaatttaaaaaagaaaaagaaaagaaaaactgtgttttgaccataaagctaaagacaaaaaaaaaaaaaaatacagaaacactgtactgtagttggtaaatgtgtttctggcaagggtatgaattagcagttctgaaaccactatttgtttattagggttgaaaaaataagtaaaaaaatatgtttatagacattcgtagccatgtcagagaaaggagttacaaataaagaaaagggagagactagaatgaaccccatgttgctggattaaagctggaggtgtcaaaatgcacccatgcttgtgtttaaaacacaggttgagcaaccctcatctgaaaatccaaaatgctccaaaatccaaaacttgctgagcaccaacatgacaccacaagtcaacatacacaaactttgtttcatgcacaaaattatttaaaatatcacgtaaagttaccttcaggctacatgtataagatatatataaaacataaacaaatttcatgtttagacttgggtctcatccacaagatatctcattgtgtatatacaaatatttcgaaatccaagaaattgaaaatccaaaacacttacggtctcaaacatttcagataagggattcaatctgtatatgcagacaggtaattgcagaaataaatacagacctgtgtttatgcatgagttagtttacatacatacgtttcctagctctaacttccgtgggggcaagaagcagtgacacccactatgaatgagcacacctagtacccaaatcttggtttctaaatattattctctaatacaaagaggagccagagctctgtggagaaatagttgattccagggcctggatggacaaaataaaaaatgagcatgaagcatcttgtaataccagaatgcaagaaagtgttttaaaaagggatggagagggccatgcacagtgtctcatgcctgtaatcccagcactttgggaggcccaggcctggggatcacctgaggttcgtgagttggagaccagcctgaccaacttggagaaaactctccctactaaaataatacagaattagttgggcatggtggtgcatgcctgtaatcccagctacttgggaggctgaggcaggagaatcacttgaacccaggaagcagaggttgcagtgagccgagattgcaccattgcgctccagtctaggcaacgagaacgaaattccatctcacacaaaaaaaacaaaaaaacaaaataccacggatggagaggctgggcacagtggcttgagcctgtaatcccagcactttgggaggccaagacaagtggattgcttgagcccaggagtttaagaccagcctgagcaatatgacaaaactttgtctctacaaaaaaaaaaaaagttagctgggtgtggtggcgcacacctgttgtcccagctacttggaaggctgtggtgggaggattagttgagctcaggatacggagattacagtgagccaatattgcaccactgcactctagcatgggcaacaaagtgagaccctgtctcaaaaaacaaaacaaaatagcaatggagatatcagctgggtgtgctggtgcatgcctgtagtcctagctacttgtaggaggctgaggcaggaggatcccttgagcccaggagtttgaggctgtatgatgatgccactgcaattcagcctaggaaacgcagtgaagtcttgtctcataaataaaacaaaacaaaaaaaggatggaggacattaaaacggcactggagcccatctgaaagagctcccagtggccaaagtttgagcaacaaaataaatagtgatagtattggatcataactcacagaacaaaataaacatttatgagtccattctgatataaacaaatagttgaataaataaaatggggagagggcacgactttttcttacagaagaatttcaattaataaatgtagaaggaatctaatctatcaccattaggattacacacctgtaatcccgggtgctcgggaggctgaggcaggagaattacttgaacctgggaggggaaggttgctgtgggctgagatcgtgccattgcactccagcctgggcagcaagagtgaaactctgtctcaaaaaaatatatatagtattgtaccaacaataacttcttagcttctataattgtatatataatctctcagtttctataattgtactatgtaagatattgacatgaggaaaagctaggggaaaaatatacgggaactctgttaattatttttgtaattctctgtaagtctaaaattatctcaaaatgaagttttaaaaattctaaaacaaagccaaaccaaaaaaattctattgacctgtacatgaaaaagggtgaattttatcatatgcaaattatacctcttgacttagaaaatcagatattttccttactatactcttttgaaatctattcattagttatactaaatacatacaaattcttttgagtgtgtttaaatactatgtttgaaaatgttgctgggtgatgtggctcacacctgtaatcccagcactttgggaggctgatgagggaggatctcttgagctcaggagttcgagaccagcctgggcaacatagtgagaccttgtctctactaaaaataaaaaaacaatcagctgggcatggtggtgcatgcatatagtcccagctactccggaggctgaggtggaaggatcacttgagcctgggagatcgaggctgcagtgagccgtgatagcaccactgcactccaacctgggcaatacagcaagaccctgtcaaaaagaaagaaagagagagaaagagaaagagaaagaaggaaagaaagaaagaaagaaagaaagaaagaaagaaagaaagaaagaaaggaaggaaggaaggaaggaaaagagaaaatatttaatacattcaaataatactagtagttaacatagtcagttacatgtggtaaactagccattcattaaattgattttcaggaaatcagctgccttctaagagaggaacaattcccggcccacctgcaatttcacactcctcttttagttagaaggacactgggaaagagagaggccccacaaatggtgagagacatctctgaatgaagatgggaaccaacaatgatcttctaaagagtgggcaaggcagggataagggtcagagaaggaggaaaagatgtgggtattctcattcaggcctgacctcaccacaagtggactaattttgtgcagtgatatggcttggctctgtccccacagaaatctcaacttgaattgtagctcccacaattcccctcatgctgtggggagtttttctcttttcgccaatcatctttctcttgctattctcatgactgtgaataagtctcatgagatttgatgggtttatcaggggtttccgcttttgcttctttctcattttctcttgccgccactgtgtaagaagtgccttttgtctccctccgtgattctgaggcctccccagccatgtggaactgtaagtccaattaaacttctttttcttcccagtcttgggtatgtctttatcagcagcgtgaaaacagactaatacatgcagtaattgagaaagctcactggggtgagggcactcgagcagggggagcaaggagagagatccgtgggctggagagaagccaaggaagaggatttgggtggatgattgagcaaagagtgaggttttaagagacagagagattgggtgttttagccccctcatgagtgttcctctccttctgttggaggaccttctcttggtccttaccaaatgtcctctaccctctgacacccagctctcctcctgccaagcatcatcccccaggcaggcctggcctatgccctccttggtcatcctgactttactgtggccacctgtgggaaggaaggccgaggccctccctgagcactgaaacaccgggtggaggatggttttcaactaggctccacatcagaaagcagtgcactcacgctgacaggcttgatcccctgtggctgctcgactctgggctctggtccaaagctgagagccccccttcccctcatgacagcctcttctgccctgcccggccactcctttgagtgacagggggtaattgagaagctgctcctccctccaggaaggaagacccggagctctggcttccctcggcaaagcacatataaacccacagccactgcgggtggaaggagaagggcagggtggaaaaagtttgagagaaggagggaggaaaaggtgtcctggctagcaccatgtggattctcttgagatgagaagaaaatgccccgctacgtcccccttctgctgctcctgcttctcctgaggtgttcagaacggggtggaggagttaattttggtgagaaggatgcaaaagtccccgggacctggagagatggagtcagggtccctggagaaggagcctcttgggactcagacagggccagtcccgagcgaaggtacggaataggtgagtgaaccttgggaactccggaccctgttatctaccctcaatcacctgccacagggaagcagggaccccagcgtctttctcatatccccttttaaggaaatgctctgcttttgattttgtgcattttatttaagtttctttgtttcaactttcctggagaaatgaaaaatttggcactcctctaatcccagcgctttgggaggatgagaaggagtgggatcccttgagcccaggagtttgagacaagcctgggcgacatagtgagacaccatctctacaaaaaccaaaaaaatcagccaggcgtggtagcccatgcctgtagtctaatctactcgggaggctgaggtgggaggatcacttgaggccaggaggccaaggctgcattgagccatgattgtgctactgaactctagcctgaatcacagaacaagaccctgtgtcaaaagagagaaagaaaaagagaaagaaaagaaagaaacggtcaggtgcagtggctcatgcctgtaatcttagcactttgggaggctgaggcgggtgggtcatctgaggtcaggtgtttgagaccagcctggccagcatggtgaaacccagtctctagtaaaaatacaaaaattagctgggtctggtggcgcacgcctgtaatcccaaatacttgagaagctgaggcaggagaatcgcttgaacctgggaggtggaggttgcagtgagtggagatcgcgctattgcattccagcctggatgacagagggagactccgtctcaaagaaaaaaaaaaaaaagagagagagagagggaaaggaaggaaggaaggaaggaaggaagacttgaaccctattagaaaaatgtggagcgtcagcagtagggagggatgactagatttgggcagagtaccaaaagttcaaaatttatgccatgtaagctacatgtattcctaagaataagaatactcccaagtcctgacggctgcctggggcagtgagggctggagacgaagaggactcatctcttctttgtacttatacctgactcagtgttgccctcagtccaactagatcacacccacacccctcatgactcctcccctaagcctgcccccataccaccttgaatcttccctgcctccaagcctaccacgttagccccagatctgacccagaagctgtctcatgctttttttttccttttttgagatggagcacctggccagctgtctcattttaaatcatataccaagcatgacctgagtgtaatctctaacatgaatcacagcttctgcctcattggtttgccagaaccgcaggcacaaatggatgagaggagacacctatgaacatggagccagaataccccaattgctgaaacaccagttcagagaggagtgagcttgagaaagagtcaggtttagtgtcccacggaaagagaccagacctggaaaagacagagtcaaagctgggtgagcaggccttcgaagggcgtggctcagcaaagataatccatattgtagtgcaagaggattcttgtggaatatgttttaccagaattaaaccaaaaatgccaaatgatccctaactggaataaatctcaccacattacctggggagaggtgtcatttggatgtgaggatagttatgaaaatactgagcagagcagatgaggataggccatcaacaattcacattaaatgagattactttttagtaggactaagccaaagcatttccactaagcacccagagaccagccctaaagactcaagaataagagaaaatgatgtaactgcagatggaaggaccactgaggaccacatcactgcagacccagggaccaccgaggactctgtcactgcagacccagggaccactgaggacaatgtgactgtggacccagggaccaccgagggctctgtcactgcagacccagcgaccaccaaggactatgtgtctgcagacccagggaccaccaaggattctgtcactgcagacccagggaccactcactgagaactttgtcactgcagacccagggaccaccaaggactccatcactgcagacccaaggaccacagaggactccgtcactgcagacccagggaccaccaaacactccatcactgtagacccagggaccactgaggactctgtcactgcagacccagggaccaccaaacactccatcactgcagacccagggaccaccgaggactccgtcactgcagacccagggaccacagaagatgaaaccactaaacatggtgacactcaccttctgtgaactacttcagtcacagcagtgaaacccaccaggctcctgacacccatgggaattatcctcatatccctggctgcaaccacagtcactgttgtgctctttgttggattgggcttcattgtggtgagtatttggtctgggaatattcagggcatcaggggaacgaggccaactgaggataagcggtgggcatggagagctgaggtacagaggcccaagaaatcgtcaggcgtgaggaagcctacatagagagagctctgcaaagactcctggaaagacagaggtggagagaaaggaaaagagcacctggcacaaaagatgcagaaagcattggggacagaggaagctgtgagagacaggaaggagagaaagggaagagaggctgagagtgagaaacataagaacacaaacatggtaagacacagcgggagtcagggcaaagcatgaaccgttaggtacagatggatgtaaaagaggaaattttcctaagaagacaaggaactggggaccagaggagtggatgaattagaaacattctgggtggtccactcatatcagaaattacatattcttgtgttaattactacctactctgaagttctgaagaagatttttttaaaaccaaaattgagtgggtttttatgagccaccactaccctgcaccaaagagacagtttgtaccagctctcaaagaggagctctgggtatttttctgtctctgagggtccctgttgtttctacaagaggagacaaaagaattccatgccagccctgcatgtttcatctcaccaaactcccagctggaatcatcccaaaagcagcagcagggaaattcccacagggagtggcccaaaccctccagagatggggccaattgggattccaaagaaagaagcccagatgtcagggtgatcaattcaaagcatttattaggggaacttacagaggactgcagcaatcctccctgccgacagggagggaaaagggatgttctgcctaagcatgtctgtagcaagggggtcagggtatggagtttatatgagggtttagggaatttgactcagggctggagccagtttctttcaacgttttgggcaacaacctagatacctttattagtgcctgggagtgttcaaggccctggtttgcgttcaagcctgctggggaaaacctgcagctggctgggtcacagaacggtcaaggcaatctgtgatttttggtcagtctgatcagaaagaaaaggaggtgatctgggggaccccacattgtggcttcctctcgctaacatttgatctaaaacccaagcctcctgcttctggcctgctgcttgagggggaagggctggtcctttttggccatcctgacctacggattaagtgcatgtcgaaattttaacaagtggcggcttgcaggattagccaactcgggcaggtcattaaagcctcgttaattcttgcggtcattgatgccattgtgcactgacccctgctccaagatgcaaatccacagctttggatcagtttgtaagtgtgagtaaagccgaaagtaatgcatgatacagatgaggtgttcacatttaattctgctaaaatgacaccatgaaactagagcattctgaaggatgctgacaagaggaaaatggaatgaaagcgtccatatgtacctgactcatgcatgagtcatgttcagtattcaccagtagagggaggaccttctggacttcgctgttaccataaacaattggatttctgatcatgtggatcaccatgaaaagttggacactcttgctctagaacaaaagatgctttccttcctccaaaccaggcattggcccagagaggtcactagcattagcaccttcttaatttcatgtagagactaaaaacaagagatggctcaaaaggctcagggtgtgggaagtaagaggaaagtctatgctcccaaacttgctaaatttttgacttttaaacctttaactcgaaaagttttaaaaataagaactatattaccattcctcccaagtttcatttgtcaaaatgcttttttctttaaactttaatggtttaagttttttttaagttgttttaaaaaaaacaaaaaaggtttaagttttttttggcagggtgcggtgctcacgcctgtaatcccagcactttgggaggccgaggtgggtggatcacgaggtcaggactttaaggccagcctggccaatatggtgaaaccccatctctactaaaactacaaaaaagttagccagccatagtggtgggcacctgtaatcccagctacttgagagactgaggcagagaattgcttgaacccgggaggcagaggttgcagtgagctgagatcgtgccattgcactccagcgtgggcaacagagcgagactccatctaaaaaaaaaaaaaaacaaaaggcttttttttccccctaaatgtcgtccacatttttggcaagtattgatctctagtagtcagtgtcaggatctgaagaaaacagtgacatctagcagactcccagagccagggaaacaggctgggcagaagtgataaattacaaaccaccagggttaagagaagaacagagtgttaaaaccaaaccattttcttcctccctagaaagagtgtttcctgcctccattaaatccatccaccagggttatttatcatccccatgtcatggactacagtacaccataaagaggaccccagcagtgactacagttggttctagaaaaaggagacccctcatccgcctctgcaagactatacagcatgatgtgtatcctcaggcctccactcctccgccctagtctggagccctgggaccaccacatgaggaaggcagctggcccctggaataagcatgtggaggacactcagaaggatgcccatctgctctgagtgtctcctaattctgcctgaccttggttacttcctctggacaatcgcctttacctatctaccaggttttgaggaattacacacagctcaggtataagagatattcggtaagtctgatcaaatcaataaagcaaattttatctgtttttgtctgggacatatctctacattcattcatttaaccaaaaaaaaaaaaaatgttttttttgagacgaagttttgctcttttgccccggctggagtgaagtggcgcgatctcagctcactgcaacctctgccccccaggttcaagtgattctcctgcctcagcctccctagtagctgggattacaggcgcatgccaccacgcctggctaatttttgtatttatagtagagacaagggtttcaccatgttggccaggctggtcccgaactcttgacctcaggtgatccacccgccttggcctcccaaagtgctaggattacaggcatgagccaccgcacctggccttaacaaaatatttattcagtgcctagcatgagctcaacactctacgtctcccagtctgtctatctcagtctacctgtaagctgaaggatacaacttatctcttaagaggactatgcccgcgttctcctaccacccaggccaaagggtcacatttacaggatgtagtcaactggtcattcagcaagtatgtatgagcacctgtgtgggactggccaccgtagcaaataaatgagtctcatcttagtcaatcgcggtgtgaaatgaggacacgaagtccagacctaacctctaagagaaaagccctgcctgatagaagaagagatttgtccttacttaatgcaaatgcaccatattcatgcacctatgaatgatggctaagaccacagacaaggccggggcattggatataacagctctgtgaggagctcaggacaaaaaccaaagaatcaaagatatgtgaagacagttgattattgtttgctcactactgatgccactatgagcagcatcaccaccagtgttaaataatggaattgtagtattatgatacagagtcggaaacacggaataataaattaaaatactaaagtgaaaaaattggattgattaaataaatattaaaccaatatttctcagacttatgtgataaacacctttaaaggaaaagatacatatatatttttgagacagagtctcattctgttgcccaggttggagtccagtggtgcgatcttggctcactgcaacctccacttcctgggttcaagcgattctccttcctcagcctccgagtagctgggattacaggcgtgcaccaccatgcctggctaatttttgtatttttagtagagatggagtttcaccatgttgcccaggctggtcttgaactcctgacctcaggtgatccacccgccttggcctcccaaagtgctgggattacagtgtgggccaccgtgcctggctggaaaagagattttttgagaactcgccatgttggcttaaacgtaaatatatatgaaacagaaaatgaagtataaactccttatgcttatagctctactgttccaataacgttagaagtaacagcagtagtttaatgtaatgcatgatatttctttactgaagaattcttcgctccaacattaatattgtagtgattgctacagcctagtttctcaaatctcatttgccacttgatgttttccttctttcatggatcgtctctgtacaagctctctcaagaccttcagtctctcagtcagctgcgggattattgggcccttaatgcaaatgcaccgtttaaattttaagacagttctcgttctactcttgttaggctgtgcaattgtaaagactaatcatttctattagctttatgttggttttatattggtcatcaatagaatccaggaaatgcttatattatggggattttcaagattattacctgaaggaaaacgtgacagaaacagctctagtctccccttcccttacacttggagaacctgagttttgggggtgatggtaatgtgcccagctgaagaaaaccatttcccaaatccccaatttcccggtcccccttgcagccagtgcagtgaggagatacagctctggccaatgtgataaaggcataagttcctggggatggtgtcccttccagatgaaaaggccaaagctcatgaggagaaagccctttgccccttccccttcgttcctcttcctacctggaatgcagatatgagacctggggctcagcaatgctgaggtcagggggagacccacagcagggtgaaggcttcaagctgagagtggagcagagggaagaaatcacttgggtgcccgatggcaatactgagccctgggctgctcctctcggacatttcgtatatgagatgagcagtgtgccggagctcagtgaggtgagcttcttgtgattccagctaaatgggatcctaaatgatatgacacataaacatcatctagaacatgcagacttctgcgaatatctccatgacacatttgggaagacacagtgctcaggattttaagaatgtgggagctacacatagtggggaatgggagaataataaaatgatctccctcttctgcccccatggaggcagcaagtggccaagggagaattttgtgattagagatacttgcatgaatatcagtttattgcaggaaaaaagagtgacagaagagtctcttggttaatatacaggcaggaaaagtccaatgtgtttctataaaatcttcctcctgaagttcaggctggggtttggggctgggcatttgtcaaagggtattggcaagcacaaggaattccagaatctgccttggtcttcaagggggcagaacttttggtctcggtacaagctaggtttgtgcaataaacaaaggaattgctagagctacaaattctagctgagaagtctgtgtgcttgagtttctgcacctcaaggacaacttagagcaattgaagagaccatgaaatctctgtaaatggcatagaaactttagcatgcaaaagcatgcatgcaaaaacgctagcatatcaaaagcttttcttttctttcaatcaagttaatttctggccaggcaggatgacacacctgtaatcgcagcactttggcagaccgaggtaggaagatcacttgagctcagaagatctacaccagcctgggcaacatggtgagaccttgtctctactaaaaataaaaaaaaaattagccgagtgtggtggcacatgcctgtaggctcagatacttgggaggctaaggcaagaggctcgcttgagcccaggaggtggaggctgcagtgagccatgactgtgccactgtactccagcccgggcgacagagcaagatcctgtctcaaaaaaaaaagaaaaaaagaaagaaagaaagaaaaaggctgggcacagtggctcacgcttgtaatcccaacactttgggaggctgaggcaggaggattgcttgaggcctggagttcaagaccagcctgggcaacatagtgagacctcgtctctacaaaaaaattaaaaattagctgggtatggtagtgtatgcctgtagtcccagctacttgggaggctgaggtgagaggattgcttgagcccaggaggtcgaggcagcagtgagctgtgatcatgtcactgccctccatcttgggcaacagagagagaccttgtctcgaagagaaaaataaaagaaagaaaatgttaatttctgctcctgtcagattagagggaaattcaatctcagtctttttgctgctctccaaagatcccagagttgtacataggattgaagcataaggaacatccttaaagtcagtagcaactggcctgtactaattattcccaggatacgcatatccctttgtggcagcagttctgccagaggcacaggggctttacccagtcagtctccttcaacttgccacgtagctttctccagaataagtccaccccctcagggtgctaccgtgaaggagagtatggttttggcatttgagagcccagagagatatacatgaagatctggtctctggagagtattgaaggtagaaaagacaaggagaagatgctgcagaacacccataagggaagaaaaaaaaaatgaagcctcaatgaataagggaaatacctttctaaccactcctgggacctgaactacaagatttggtagttgactctcaaaccataatatactcatactcagatgacacttataagttgtcgcacatatctgtgcattccatgcctttggtaaatgcatacagttaatcatacagctaatcctccttttctctttatgaagtccagtgtttaaaggacctcttcaggtgtcatcaaggagtcataccaggtccagctgaacccaacttgcacaagtccagattgaggacaccaggcaagtaagcacacccctctagattgtgcctgaacaggatttatgccttttggggagtgtcacctctcattaaaacgtctgcgaatgcacactctggtccagtcccctgtctttctaaacaagaatgtttggtgaagcaacagtgattcaacactctcccttagcgaggtattgtttgacaccttagaaaacacgtagttatttttcagatctattcaggacctttcttgtgattcatctaaaacaaacccctctcttcagtctctacagattaccatatttattttctttatggagctgacgacaatctgaacttatgcttatttacgtgttaacttatttgttttatgtctgtctccttccactagaatgtcagttccttgagaataggggttttgaggacaatatatgagatagattagatatttaataatcatatgcttcattgagcctctgatgcacatcttccccattggatcgtaatctaaaattgagatgtcggatgggcgtagtggctcacacctgtaaacccagcactttgggaggctgaggcaggtggatcacttgacgtcaggagttggagaccagcctggccaacatagtgaaaccccgtctctactaaaaatacaaaaattagctgggcgctggtggcacacacctgtagtcccagctactcaggaggctgaggcaagagaatcacttgaacctgggaggtggaggttgcagtgagccgagattgcaccactgcactccagcctgggtgacagagtgagatgctgtcttaaaaaaataataataaaaataaaatggagatgtccactggctgcagtggttcaggcctgtaatcccaggacttttggaggacaaggtgggaggattgcccagagctaggagttagagacctgcctgggcaacatcgcaagacactgcctaaaaaaaaaaaccaagaaacgtttaaaaatggaaaagtgtcttacacttgatagcacatcatgaaccagtcagtagcactctttcttccttagtggggcataagtaatgctgcatcttgcattcaacgtcatcttagatgggatgaaatacacattttggaataaacgaataaatgtatgctttcttttggtgctatttcttctgttttggtcttatttgtaaacacaaggaaattaggattcctttttttttttttttgagacagagtctcactctgtcacccaggctggattgcaatggtgtggtctcagctcactgcaacctccgcctcccaggctcaagcaattctcctgcctcagcctcctgagtagctgggactataggcgcgtgccaccacacccggctaatttttgtatttttagtagagacagggtttcactatgatggccaggctgatctcgaactcctgaccttgtgatccacccaccttggcctcccagagtgctgggattacaggtatgagccactgcacctggcctaggattcctttagtaactgtctagtatggtgctgggaattcttttgggaacagaggcagccaaccaacagaagtgaatgacatagttcttaccctcaaggacaagaaaaccagcaattacagtgcaacatgctaagtgctacaataaaggaatgctttcgggcagagtccagagaagggatctcattcagcctgtgcagatcctggaaagcttcccaagggatagggtaactgaccggagacttgtgacatatttgtggggcactttgagctgctgtcacatatgtggattcttttgatcttcacatcacctctgtgaggtaggagaaccatcctgtcttagaaatgcaaagactgaagttcagagaagttaaataaattgtccccaaacctccttaacggtaagtggcagggaggggtggggggtgagggagttaaactcaggtttcctggctccaggattactcactttttatctcatttggactgaatctcaagtgatgaactgttctgcactgtctctacaaaaatcactcacaggtatgaacacttttatccttcagtcttctcttctttaggcttgcaatggcaggctctcggatctttcctccaatctgtattgggttttgagccaagcaagaaaaaccagacacagtccctattcttgaggagcccccagtctgaaaacaagtcgtggatacacagaaaaaacattcttgtgtgtgtgatggatggtagggaacgtgtcatcaattgtgacatttatggcatttatttgcctttactagtgagttctgctttttaagatgtttgcgacttctcaggcctcaccctcaaaagaatttgaaaattgaacacaagcagagatgttttgttttcaactcaggacctcacccagagttttttaggcagcaaccctgaaccaagttggcctcgaggtattcgtgagtttccatacccagaagactttttcagcttctaccttctacccatgaaaggaggtggcatggatgtttcctttttctttttctttttttttttttttagtatttattgatcattcttgggtgtttctcggagagggggatttggcagggtcataggacaatagtggagggaaggtcagcagataaacaagtgaacaagggtctctggttttcctaggcagaggaccccgcggccttccgcagtgtttgtgtccctgggtacttgagattagggagtggtgatgactcttaacgagcatgctgccttcaagcatctgtttaacaaagcacatggtgcaccgcccttaatccatttaaccctgagtggacacagcacatgtttcagagagcacggggttgggggtaaggttatagattaacagcatcccaaggcagaagaatttttcttagtacagaacaaaatggagtctcccctgtctacttccctctacacagacacagcaacaatctgatttctctatcttttccccacatttccccctttctattcgacaaaaccgccatcgtcatcatggccggttctcaatgagctgttgggttcacctcccagacggggtggctgccgggcagaggggctcctcacttcccagtcggggctgccgggcggaggtgcccctcacctcccggacagggcggctggccgggcgggggctgcccccccacctccctccctgacggggcggctgccgggcggagatgctcctcacttcccagacggggcggctgccgggcggaggggctcttcacttctcagacggggcggccgggcagagacgctcctcacctcccagacggggtcgcggctgggcagaggcgctcctcacatcccagacgtggcggcggggcagaggcgctccccacatctcagacgatgggcggcccggcagagatgctcctcacttcctagatgggatggcggccgggaagaggcgctcctcacttcccagactgggcggccaggcagaggggctcctcacatcccagacaatgggcggccaggcagagacgctcctcacttcccagacggggtggcagccgggcagaggctgcaatctcggcactttgggaggccaaggcaggcagctggaaggtggaggttgtagccagccgagatcacgccactgcactccagcctgggcaacattgagcactgagtgattgagactccgtctgcaatcccagcacctcgggaggccgaggctggcagatcactcgcggttaggagctggagaccagcccggccaacacagcgaaaccccgtctccaccaaaaaaataggaaaaccaatcaggcgtggcggcgcgcgcctgcaatcctaggcactgggcaggctgagacaggagaatcaggcagggaggttgcagtgagctgagatggtggcagtacagtccagcttcggctcggcatcagagggagaccgtggagagagagggagagggagagggagagggagacagtggggaaagggagagggagaccgtggggagagggagggggagagggagaccgcggggagagggagagggagagggagggggagagggagaccgtggggagagggagagggagggggagagggagaccgtggggagagggagagggagagggaggagagggagagggaggggagggagagggaggagagggaggagagggagagggaggagagggagagggaggagagggagagggggagggggaggtgagggagggggagggggagggagagggagagggaggagactggatgtttcctttgatcatctatcacatctttgcagaggacatataagcctgtgcatggctatgagaacacagtggagagccatgtaaatagcttttgccttcaaggtgcctggcagaagcgaatgaatattgctgtcatgtacatgcaaacgttgtgaaatgcttcaatgttccacatcttctttggagacctttaagaaattcatggaactttcagcagtgatatttaccaccaacaatgtaatcaaatggggcagcaagcaaaatgagctactactaatgcaccatggagcagaggaattttctcttgcgctaacaccacaacagacccattctttcatttggattagtattcactacttgtgcttagttgcttgcagtggatacccaatttgtgaagtgagctgaggtataatgcagtattgtatactggaacacaggggctgcaaaagcagaactcactaacaaagtcaaatgccatgaacgtcacaattgatgaaaactggccatttgaaaaatctagatatgataaaattgttaaattgatgaggatgaagattggattatagtatatattcagcatgcaaaaacagataatcaggggaaatgcagtgacagtcaaagcaactatggaaacaatatccatggcaacaaatggcctggtcggaagagaggcccaaagactgcctgtgtcttcctgatgaaatgtctggtagccccctagtggcaatgaccgggtagtggccctctgcgagatgggcgcctctctggagattgagcgccacttctgagggcctggagaagttgacttgttttgcatcccacggggtcacccccacctccccctttccttgcactcactgacatgagacacaacgtatgtccacaaacaactgctgctcctcattgcatctaaagctccgttgccggaaaacataccattatttcatgcagcactaagaggaaaacacagcgggttaaactatgacacgccattgattgtaagacgcatccctattcaagagatgataaatgggaaaataaatatatgtcttacaacctataaaatataaatgactttcggcatttatattatattacagggtgaggtggctcacacctgtaatcccagcactttgggaggccgaggcgagtggtttgcttgagctcaggagttggagaccagctcggataacatagcaagactctgtatttaaaaaatatatatatatatatgtatatatatacacacacacatatatataaatgactttcagtgattcatttaacattttcagatacttgttccctcacaaactaaacaactaaaccattaattaattaattcactcattctactcacatttattaagtgtggattattggacaagcacactgacgtcaacactgaggatacagcagtgagctggtgtcctgtctttagggggcttttgttacagtgacttggtttctgattatctttgtcacactgaatctgtgagtcagtgagtccgtgaccctaagtgagtttcagagtgaaaacagacaccagataagaagccagaaaacctgggttctagtctagttcttccccttaatagtttatttaatctgtctcaaccttattttatctacttatagtctatcacggttaaattgagaaatagttatatttttctcatagcagagtctttcaaacaatacgcaatgacaatcaaaatagcaaagtagctgtggaaacagtgtccatggcgaccaatggtcccatcttttctttctttctttttttctttctttctttctttctttcttcttctttttctttctttttcaaggtctctgagtttcaagtcaagcctaaaaaaaattttaagtttttttaatttgctggaatgcagtggcatgatcatggctcatagaagccttaatctcactggctcaagtaatcttctcacctcagcttcccaaatagctgggatcataggcatgcaccaccatgccctgctacgttttatttttattttttcaataaagattaggtctcaccatgttgcccaggctggccttgaactcctggactcaaggtatcttccagcctcagcctcccaaagtgctgggattataggcatgagccacagcacatggacctcatctttctttcatgtcactagatcaagaaagctccagagtttttcttgttcccttcaggtgtcaagcaatatcattttatgtatataaacatctaattcagaatagtttcactcttttttcctattgtcctgcataaagcttccccctccccagtggacagactgcaatgggctggcatctgacatttgtctgcagacctcatggtaggagacaggctggttttctgccctgggagtgggagtgtaggaaaggaggaggcactggggacctgtatcccaggttttcagggcaaggctgtgtaagtatttccagcagactagtgtgaggcatgctaggaagcgagctgatgtggagccgagctaatcctgtctgatgtggccacctacaggcatcaacaggcctcagcagagagaagctgaagtgattactgcattcctatgagctgtgggaggaataaatcgtggaaagaaatcctcatttgcaactgtatggcattaggggtgaggggtctcggaagaagcacccaaggaggaggaatcccctgtaagcccctaccagtcccagagaatgcaaagccctcttgcaaaccgtgcctgctccacgccccagaccactccttcccccaacccttccccattctactcaaccttggagggttagaaaccaccattagcaagacaggagaagaaggatagatgcataatgttgaggacctgtttccccatttctcatcttcccatccttgcaaagcccttgctggaggaaaggagacttacctttggaactaaacgttgagtttctgaattggcattgtgtttggtaatataaaataactacaggacctaagagagatcagaacagtcttagtactgtccatattttcatcttggaatggggaaaactggctccactgagcaagttaaggacgtcatagactgatctgtagatgttcaatgaaatctgtaattcaagactaaataacgtattcttggctgggcacagtggctcacgcctgtaatcccagcactttgggaggccgaggaggcgggcggagggcagatcacccgagggcaggagtttgagatcagcctggccaaagtggtgaaaccccatctctattaaaaatacaaaaattagccaggcgtggtggtgtgcacctgtaatctcagccactcgggaggctgaggcaggagaatcacttgaacccacgagacagaggttacagtgagccaagatcatgccactgcactccagcctgggctacaagagcaagactccatctcaaggaaaaaaaactaattaataataataacttattcttgagacacatgcgatgcaagacaagtatttattgctaggatctcctcaggtaagctgtgcagtaagtctgtgctgtcctacatggtagccattagccacatgtagcaactgagcacatgaagtgtggctagtccaaatacaaatgtgctcttaagtgcaagacacacatgagatttcaaagacttagtacaaaaacagtaaaatatctcactaataatttttatgtttattacttgtcaaaatcacaatattttggatatgctgtgttaaataaaatttactattagaattaatttcacctgttgttttttacctttttgatgtgactactagaactttgtaaattacacggagctcgctttctgtggacatgtagtctctctcacagagaaatacatgtatatttctgctggacatgtagtctctctcacaggtcataaggcactgaggtcacaggccataggttgggatgtttctcctccagagagtagctcattctcactttaaatcatcctaaagaacacaggtactggtaggtaggtgggccgcaagctggattgagtggggaaacttcctgctgtctttgaaccagaacaagaacagagttgggagcctgtattttgcatagtgaaggcacactcaagggagccacctatcttggggagttatgctggcccccaaaactcagagcgtgctaaaggtgaggcagagaagcctcctgtagcaagtgcatacagggaggggcgtgggcctctgaaatctgaaagcaccatgtctcatttccagttttaagtgtacctggaattctcttctgttatccctaggtctttagtggagcctgattaaacatgaggctgagggcagctgtgggagctgagggtggattctgtgcccactcgtggcccccccactggccatggcttcctccccagcaggcctcgacagcagtctctggagcctctggcccagcttgctgcgggtcgctgctgttctctttgtgtctcttagcctgtgacttcaatgcagtcatctcatttctgggaatctatccaattctcaattgtgtaaaaagctttataaacaaaaaaagtgcattacagtttactatcttaacaaaatattggaagcagcagaaacatttagcagtaaaaactataaattatagactatgtactttgtgcatcattgggaagccacttaagtgacttttattaaaacttatattaacaaagaagacaatagtgtcataataatttatttaaaaagaattaaaggccaggcacagtggctcatgctgtaatcccagcactttgggaggccgaggctggcggatcacttgaggtcatggcaaaaccccatctctactaaaaatacaaaaattagccaggcgtggttggtgggtgcctgtaattccagctacttgggaggctgaggcacgagaatctcttgaacccggcaggcagaggttgcagtgaacagagatcacgccactttactccatcctgggtgacagaactagactgtctcaaaaataaataaataaataaatataaggaattaaggaacacacaattatatatgcaattggtgacaataaaatacaacccctcaaaaagaacaaaaacaaaaacctaaacaacaacaaccacctaggtataaagaaaagactagaaaaaaatgttttaaaatgaaaccataactgtattagggttctccagagaaacagaactaaaacctctctctctctgtctctctctctctctcatatagatgagaagacacactcaaaggagctcatataggtgagagagagattttaaggaattggctcacacgattgtggagattggcaagtccaaaatttgcagggaaaactggcaggcttggagacaaaagttaatgtcacagttcaggcctaagggcaacctggaggcagaattccctcttccttgggggatgtcagacccactcacatacgggagggtaatttgctttattcaaagtccatccatttaaatgttgatttcatctacaaaataccttagtagaaacatctagaataatgtttgaccaaatatttgggtaccatggcttaagcatactgacacatgaaattaacctttggctgggcacagcagctcatccctgtaatctcagcactttgggaggtttagatgggtggattgcttgagcccaggagttcaagaccagcctggggaatatagtgagactctgtccctacaaaaaacaacgagaaaaaattagctaggcatggtggcgagtgcctgtggtcccagctgctcgggaggctgaggtgggaggatctcttgagcctgagaagttgaggctgcagtgagccgtgattgtgccactgcactccagcccgagtgacagagtaagaccatgcctcaaaaaattaattaattcattaaatttaataaatatttttaaaaattaactttcacaatgatctaaggcttactactttaggatttgcttttgaaatacttttctgtgttttccaaaatacataaaataataaagatgtacttatgatggaaaaggcctgtgtaaacacattttaaaacacagcctccttggggtagccccagagtcccagggctctccatggccccttggacacctttcacagcattcctcacctctgtcttctaccattattatgcatgtctgaatatgtcttcctttgctaaacatcaaacagagttttaggactgggattctagaaagtgagagaaggcaggcgcagaggaggcagtgggagcctgcctgagggcattaacgtcagtcctgggctatgtgctggctcctcaggaccgcccttctgaggggcacagacacgtgagtggagggagctcatgttccagtttctttgcaaaaatcaacttgataaagtttttcctgttttgttaaaattgcctaaaattttttagcaatacttcatttgattttctctaatggtttctgtcatttctttgagttttaatttattgctcatgctttaacatcccagtttatgtcttgcttaatttaatgtccatatagttgacccttgagcaacatggatttgaactgcataggtccacttaggtccacttatgcatgggttattttcaatcaaatgcagatcacaaacacagtaatggtgacatgtgaaacccatgtatacaaaggcccaactttacatatatttgggacccaaagggctgactgtgggacttgaatatgtgtaggttttggtatacacaggagtcttggaaccaatccccctcatataccaagggactactgtatatctgctttgtttatttcttttttttttttttgaggtggagtctcactctgttgtccaggctggagtgcagtggcgccatctcggctcactgcaacctccggctcccgggttcaagtgattctcctgcctcagactctcaagcatctgggactccagtcacccgccacgcccagctaattttttgtatttttagtagagacggggattcaccatgtcggccaggttgatctccaactcctgacctcaagtgatccgccagcctcagcctcccaaagtgctgggattacagtcgtgagccacggtggccagtctcattaccatttgttaagaactcatttgggcgggcaacaggtatacatcgcctcatgaaaactgagtcactcagcctgtgctcccacctggacagaacaccatgcagcctctgcttagagatgctccacaggagccagtgtggaaacaccagggccaggcatcctttagaaaaccattttgggattgctccagctcatgaaccagcagttaactgagtcaccagccatatcataaagcatgactacaactacgcaggcctggtccctaaccccatgttgttacagcaaaatataacccattcttatttcagaaaaagaaaaaaagctagatgtgatggcacatgcctgtagtcctggctacttggggggctgagtcagaggatcagttgagcccaggagttcaaggtcacagtcagctgattgtaccactgcaccccagcctgggcaacagagggagaccatctctaaataaaataagacaaaaacaacaacaaaaaaaaaacagaagaagaaaatataccaaaatgttaacaatgtcttctatctttatttattggggttagaaattacttttgttttcttatattatgtatattttatttcaaacctgataatttttttttcctttttgagacaggatctcgctctgttgcccagggtggagggcagtggtgcgatctcggctcattgcagcctcagcctcccaggctcaggcaatcctcccacctcagctccctgagtagctggggctacaagaacacgccaccatgcctggctaattttgttcgctttttgtagagatggagatctcactacgttgtccaggctggttgcaaactcctggactcaagccctcctgcctcggcctcccaaagtgctgggattacaggcgtgagccaccatgtccagccaatgttatttaatttatttatttttatttatttatttttttgagacagggtctcattctgttgtccagactagagtgcagtggtgcaatcatggcttatcgcaacctcaacttccctgggctgaggtgatcctcctaccttagcctcccaagcagctgggactacaggtgtgagccaccacacctggctaatttttgtattttttgtagagatgggggtcttactatgttgctcaggctggtcttgaactcctggactcaagttatcctcccacctcggtgtcccaaagtgctggtattacagatgtgagccaccatgtccagccttatttttaaaagaaggagaaaattattgagcaagagagtctctctgcagttcttaagattgctgtcagaaccacctcaatactctttctgcagtctgtgctttgagcagcaatataaaaatgcagcattttatgagcattaatagcagggaatgtaaattagcctatttgttttggctctgctttgcttctgatcattagaggccagcaaaaatagaatgagaactgcaaactccctcttgttcccggaagatctctccacagcatggcatatcagtcagatttctgggctgtctcatctccgtctccgtaagaaaggatcttgttggaaatacattgaggcatacactgaagcagaggccccagtgccacctgggcagaggcaagccagagaaaacagagggaaatgaaaagaaagacttcctggtattcacttctacatactgccagctaagctgcgctgggtacccagagcccacccaccacatctacaccacaaattcaactgggacttcgggctttttttttttttttttgagtctgagtttcgctcttggttcccaggctggagtacagtggcaggatcttggctcaccacaacctccgcctcctgggttcaagtgattctcctgcctcagccttcctgagtagctgggattacaggcatgcaccactacggctggctaagttttttgtttttttttttttagtatagacggggtttctccatgttggttaggctggtcttgaactcctaacctcagatgatccgcccaccttggcctcccaaagtgctgggattacaggcctgagccactgtgcctggccgggccttcaggctttatgtagctgattgaacacaaccatctctgctcccagcagaaatcccaccaaaatgtgataaaggggttttaaaaggcaaggactgacaagaacaaaaggcggggggagaggagagagagagagagagagagagaaactgactacacaatctaaataaatagagaataatgatctggataacaaatagacaaaggtcttagcagataagagaaatttaaaggtaaaatgtcagtgggagaatcccagaagcaggctgatttcacatagcagaaccccagtaaggaatggagaaaccaagtatcccaaacgtgagtgtgcaagaggcctggaaccagaggctgatggtctatgtaagaagccactagaaccctagatctcctaactcaacgcacatggcagagtgaccccctatattccaccctaatgagtggtttgctcgctggaggcgttgaaccatgccacatcctgggaaccacaatgaaaatcatttaaggctgggcgtgatagctcatgcttataatcctagcactttgggaggccaaggcaggaggatcacttgagtccaggaattcaagaccagcctaggcaacagagcaagatccccagctctaccaaaaaaaaaaaaattacatatatatatatatagcctatggccttctggctttatgtggccagaagaaaacaaaataaaataatttaaaaaatagaaaataagtaataataaaagaaataaaataagagaagcaataaaagaaaagaaaaagtcatttaggattatgtaaaagcctgcctatcgaacagtaaggcttcctggtcccctccatgaagttggttctgagaactccagcagccagacttgccccaggccgattaatagagaaaccttctctggagaaactgaccagacaaggaaaaacacctaggaacacaggagtaagggggttctgacggatattaagctactgtcacttgacttcaaaaccctcttccactctctccttcccagctggctccctcttaggtgtagagggaggtgtcagcactggaggaagaagggatcccttcccttgttggcctcccaatcctgccggcatcaccacagccgaggatcttcagccctgtagcaacagctggtccagcagcagtagcaagtcccaaactgtggttcttcctcactcccggcaaaggcctcttcccgtggcctcagtgataccggctcactggccaggctcctccttaggaaactgaattctagctccgtggggccatcctcccagattctcccattgaataatactgacctcttccctcagttccccaagactgagggagaggcagttgccccattcctgattcccacgcgttctacctctgcggtatctcagtgctctttttgtctttttagatctcaatatgtggttaacaatcctttatataaaattacctctgtctgggcgcggaggctcacgcttgcaatcccagcactttgggaggccgaggcaggtggatcacctgaggtcaggagtttgagaccagcctggccaatatggtgaaaccctgtctctactaaaaatacaaaacttagctgggtgtggtggcaggtgcctgtaatcccactacttgggaggctgaggcaggagaatcatttgaacccgggagaccgaggttgcagtgagccgagattgtgccactgcactccagcctgggcaacagagtgaaattccttttcaaatagaataaaataaaacaaaattacctctgtttaaatatttggatttttttctttcacctgactagaccctaatacaagggtcttctggagaaacagttcagcccatttgcactatggtgaagcccactgaaacctccccccatccccaacacacacacctggagtttccaaacagcttaagatctaactaagccaaggattactgtatcattcacaaagcccaagccccaatttgagcagagaaagtttattattagaaagaattattggctgtaacaggctaaaaagacgtgcagagaactccaaagaatgctgtagggccgcgggagagtacccaaagaaggacacacgtggaagcatccccaccccaaagctggattcagaactcaaggcagaaagtgtgcatgtgcccaccaggtaccagattatttccctgggatgcccaggccaaagcctgtgaacagtcatgagcaagcaggaaactgggggggtcgcggcatcgggagcccactcactgcatgcaaggcctggggcatgcagggtccacgtcagggccagctcgctgggggaacgcatgctgtcagcacgcagctaggacagagaccaccggatgttcccacctggccactgatgggccctgccgcaggagcaacaagaatcacaaaccatagctcccggaaccagagataaaagaaattctttcctctggcagtgtccctccggcgccctctactgagaaagcttaatattgtgctggctgcgaaggagaaccgcttaattcaatacagatcagttaagaggatggatttacggttgagaggcaatacattgataagaaactagtcattatgggatgaaaaccactgacatgaaagacaggtattgaaaacacaagaattaaggaatataaagccaggcgcggtggctcacgcctgtaatctcagtgccttcgcaagccaagctgggcggatcgcttgagcccaagagttcaagaacagcctgagcaaaatggcgagattctgtgtctacaaaaagtacaaaaattagccgggcgcggtggcgtgcacctgtagtctcagctgctcaggaggctgagatgggaggatcacttgagtccgggaggtcgaggcttcattgagctgtgattaagccattgccctggaccacaacagagagaccctgtcaaaaaaaaaaaaaaaaaaaaaagaagaagaagaagaagaggaaatttagagaatgcaaagagccaaataataaaatccactgcaattaatattttcataaacataagagacgatattttctccatggtaaaagaacacattattaaataaaaaatttaaagttgaagaaatcttctaaaaagaagcaaagggtaaagaaatgtagatgggaccgggcacagtagctcaggcctgtaatcccagcactttgagttgcggaagtgggtggatcacttgagattaggagttcgagaccagccttaccaacatagtgaaaccccgtctctactaaaaatacaaaaattagccaggcgtggtggcatacgcctgtaatcccagctacttgggaggctaaggcaggagaatcgcttgaacccgagagaggtggagattggagtgagccgagatagtgccactacactccaacctgggtgactccatctcaaaagaaaaaaaaaaaggaaaagaaatgtagatggtatagaaaatatatgaaaattagatcatctggatgaataggaggatttctagaaagaatagacagagggaacagaagggatgaaattatcaaagaaataattcaagaacttttctcagaactgagagatatggttccaaagtgagatagacctcaagtgtctaacagaagtgtctaacaaaaggaatgaaatccaaggcatactaccataattttaaaaatactgaggacaaaaagaaaaatcccaaaattggacaaaaagaaaaaaacaggtcacatgaaaaagatcaaaactcaaatggtatagggttttctctttttttctttctcttttcctttttttttttttttttttttgagacaggatctcactctgtcacccaggctggagcgtagtgatacaatcatggatcactgcagccttgaactcctgggctcaagggatcgtcccctctcagccttctgaaaactacagacacgtaccaccatgcccagctaatttttaaatttaattttattttttgtagagacgaaatcttactacgttgcccaggctggtcttgaactcctgggctcaagcaatcctcccactttggcttcccaaagtgctggtattacaggtgcgcaccataacacctagctgaggacttttcaacagtagcactggaagctggaagatagtggagcagtgctttcctaatttaggtgtaaattttacaacttggaattttattttcagtaaaactattaatcagatgtaatcataatataaaagacattttcagacaaaatttcaaaaattgccctcccttgcccctttccttaggaagttccatcaaagtaagggattagatcaggagagataaagatgtgggatcctccaaagagtgaggagaatgaaaatcccaggaggttgctgtgtaggagaactagggatccgcaggtccagattaaaatggtttggaggccgggcatggtggctcctgcttgtaatcccagcactttgtgaagccaaggcgggtggatcacctgaggctaggagtttgagaccagcccggccaacatagtgaaaccccgtctctaccaaaaacacacaaaagaattagctgggcatggtggcacatgcctgtaattccaactactcaagaggcggaggcagagaatttcttgaacccagaaggcagaagttgcagtgagccaagatttcaccactgcacttctgcctgggtgacagagtggatctcaaaaagaaaaaagaaaaaaaaaaaaggcttggggccaaaacctcagggattaagaaaattcctttacctggttacagaaagatattaccaagaaaaagagggaattgattaattgtaatacattagactgcagagaaaaaatagacttctatagaatctgctgacaaatttgtgataaattcatagacaaatgatcaaaagaaaacctagtagatctgtataattctggatatcattccataaagcccagcttagaacctgtgccctcagcccttataaagatttcaaaagctcttaataccctttgtaaaatgtcttcctgttaatttacctagcgtaatctctagttgctgcactgaaccctgactgatataacttgttattaagaaacaggaagataaaaactaattgagcatcgaagtgcttttacttctaggaagagagaattaggggttggtaccggactatagcttttgttctgtctttggctttttaaattacatatctgtaatttatatacacacacatatatatttggcttttaaaattacatatctgtataaatctgataaaaattttaaatagttaaataaaaacttatttaggagataatatattagaatactaagatgagtgctgagtttaaaaaacaaaaaggccaggagcggtggctcacacctgtaatcccagcattttgggaggccaaggtgggtggatcacctgaggtcaggagtttgagaccagcctgaccaacatggtgaaaccctgtctctactaaaaatacaaaaaaatcagctggggatggtggcaggtgcctgggtaacagagtgagactccgtctaaaaatgaaagtggcatctgatacagagaagattagcatggcccctgctcaaggatgacacacaaatttgtgaagggttccatttaaaaaaaaaaaaaagtctgagcgaggtggctcagtcctgtaatcccagcacttcgggaggccaaggcgggaggatcacttgaggtcaggggttcaagtccagcctggccaacatggcgaaactccgtctgtactaaagtacagaaaaattagctgggcatggtggtgcatgcctgtagtcccagccccagctactccggaggctgaggcagcagaattgcttgaactcaggaggcggaggttgcagtgagctgagatcatgccattgcactccagcctgggcaagaagagcaaaattccatctcaaaaaaaaaaaaagggcatctgaatatatacaattacaatgtcaataaaaatagataaatgaataaatacagttagtctttttttttttaatggcatctggacattcctacattctggaagatttacaaatacatagtggggatacctctcataaatgtataagcctctcagtttttccttccaatgcattgcagattgtccttatttagccctttcccctgggaacctgagactgagagcagtgcaagctatgctttttttgtaaacacagcacctcacatttctagaagacaaccctaagtaaacttcagggccctacgtcggtcaccattccatctgctcttctctgctctgattcttcctatccctcagaaacccaaggcctccttagccaaacggagctgctgtggtcgcaaatagccttgtgcccctgggaacctgtgagatgcaatatgtcgtcagtctccctcaatcttggcctgagtccaagagaaaggcagctgctctgaggttcgagactctccagtgactcagctctctaattcccagtactctgtgcatatgccctcctcaattccatctcctagacttgccagatgtaggtcgagtcctcaaagatgagataaccaagatgcaaaatcctaaaatcctccattaagcacctaccagctgcagaggccctgctggggccctgagggagatgtgtgtggcagactgcaggccaagtaagtccttctttaaggctggtgtcatgagaattactcaatgccgcctcctgctggggaaggacacttcaccccttttatggaagcccaacgggaaggactcatgggacagggcaggctgccctgtctcttttttaggcagtcactgcaatcacacatgctcactaatccagttcactaaggtacgaagccacaataaagtttggagccaaaactgtagatataaagagagttcctttatctggaatggcctcgatttttgaataaggagttttttgttgttgttttgttttgttttgttttgtttttgagacagagtttcactcttttgcccaggccggagtgaagtggcaagatctctgctcactgcagcctccgcctcccgggttcaagcaattctcctgcctcagcctcctgagtagctgggattacaggcgcctgccaccacgcctggctaatttttgtacttttagtagagatggggtttcgccatgatggctaggctggtctcgaactcctgccctcacgtgatccgccggcctcggcctcccaaaatgctgggattacagacgtgagccaccaagcccatccataaggttatattttttaatgtcctgcctcctcctctttttttttcttctctttttgttttcaaataactaaagatgcacagaaagttgcaaaattagtaccgagatgtcctgtgcactcttcacgcagcttccccagtggtaagctcttacatactacagtacattatcagaacaagcaattgatgcatattttctcaatgcattgcagtaggtggatttggtacttgagaccctcaacaatctctttccgcatatcatgactaacagtataggctcatggtttttaaaggactgccctttgaaggaactggatggaattttgtttgcaaagagctgagaatcactggagaggcaataaatggaaatgttcctgtagattgtcactatagagagcagggctgatggatgtcaaaggatatccagggatataagccctcagcagggaggagagcaaaaaggccagtgtggttggttattggagaagttatttggatagtttttaattagagacatctcttgcatgaatggatttcctaatgaaatcaaattttgattgtggaaagcataattaacatgtaggaaacatcagtatattctaggacctgagagtaaaggatgaagtcccttttagagagatacactgttctcttttaggaagatgggcatagaagtgcaggaagtcaactagacgtgttaaaatataaatttttggctgcttgtaacagagacacaaatgccactggtttaaattaggtagaaaatgttttcccacccttggatccaagcacatgaggaccctgcccgggctccatgatctagagggacctgctctatcattcccccaacttataggacaaaaagtccgagaagccaaagggatagacctacccatggaggttgcatctcttctacaagtactacagtctaggtacttggaacccctgaattcctggcactaatggcccccaagcctgcttccaagtttgcatgggcctcctcctggggccatcgtcccaggggttatgcctcgctgctgtcgtgcatgctctgagaccccaaaatgtggctgttttcagagaaggatatgggtctggagattttagggacttgaattttcaggaaaagaaagtagggcagatgcaggtagaggacccagagctagttttcctcactcagccatattctgccatggaacctaggggagtctcagaattctaaattccagcctggctgtcctagcctggattccccagaaaacagattctcagatagatttatctgcagaagttttattggggaacaatcttgggacaaacacctttaaaagctgagagaaacgggacagggaaagggagcagttgaactgtaatgaagccgtaaagagtactgagctgatctcatgggttgtggaggcctctggcactggaaaagtcctttaaatttggccaaactcggccgggcgcggtgactcacgcctgtaatcccagcactttgggaggccgagtgggggaggattatctgaggtcagcagttcaagaccagcctagttaacatggtgaaaccccgtttctactaaaaatacaaaaaattagccgggcatggtggcatgcgcctgtaatcccagctactcaggaggctgaggctggagaatcacttgaacccaggaggcggaggttgcagtgagcagagattgtgccattgcactccagctcgggcaacaagagcgaaagtccatctcaaacaaacaaacaaacaaacaaacaaaaaggtggccaaacttgaagcaaggtaaccaggactttgtatgttcttatcttatctatcagtcattggatgtggctgcccccagggaggggaggtgtaaccttgggcaagacagctcttttcagctaagggcaattcccagagacagagctgtcacaaccaacacccctggcagctggggaataagtgacaatgttgaaggtaggatttgggtggcacacaacagtatctgctacactagccttcaagatcagtatgaaggtatatttatcaagacaaaagctggaacatgttttattcaataatttatttgtttgacttataacaataaaccatctctaacacacatttcccttcctgatatcagacagctgctctgagggatacccgagacccacattcaggaagtaagatagatatcagcctggactgctgaatagatgccctgtgatttatcttcagacatgactcagtggaaatgcagttgactccattctaaaacctctcttgagaatatttccaggcccagtcaacttatcttggtctcactataaggaaaggaactgagatcagctgcaccctgagaggctaagatcctgatagggagcaggtgaaatcaggttggaaaatagacaagacaaaggcaggcagatgtaagaggtattcaaaagcccagttgtgctctatttttgccttccacgaggaatcttacggggagcttccacattacccggttattggtcacggcggtgagttaaggctgttttattgaatgaaatcatcaacccccctccttttcctgctaaaacgcaatctgtttccaagactttcctaatgtagagtgattttattgagcctagaccatggatttcccatctgataactctttaagagggatgagatagaacataatgtgagaaaataacattgttccaagatttgtaaatgctaataattgttgaagtcccatggtaggtaaatagaggtattttctttatttttgtgtaagtttgaaaatttccataataaaaagtgttataaattgtcttagcaggtcacataactaataataaaggtaaaatttttgttggtcttaatgagagagaatttggaaagtggagataagcggggctttggagctcctaaactattcgggctgtgttttgactcagcgagctcaaagtgggagggcaggagagctcgctttttaaaagatcgacagcgccatctaccggtaagagcgcccaactcccttgctaaggatgatatcattatgctagggtgatagtagcaagcctcattgttagtcacctaagaagttaagacaataagaaatcattcaaaaaataaaatggtggcaggacgaggtggctcacgcctgtaatcccagcattttgggaggccgagaggggaggatcgcttgagcccaggagtttgagaccagcctgggcaacatagtgaggtccaaatcgctaccaaaaaaaaaaaaaaaaaaagagaaaaaaaaaagaaaggcgttaaaattaatttaaagatacacaataatgaaaatattacaaagtactattattcagccataaaaaagaaattacattctatttatttattttattttattttattttgcagacagagtcttgctctgtcacccaggctggagcgcagtggcgcaatcttggctcactgcaacgtccgcctccccggttcaagggtttctcctgtctcagcctcctgagtagctgggattacaggcacgcgccatcacgcccagctaatttttgtattttttttagtagagacggggtttcaccatgctggccaggcgggtctccaactcctgacctcaggtgatctgccagcctcggcctcccaaagtgctgggattacaggcatgagccaccgcgcccagcagaaattacattctgatacatgctacaacatggatgaacattgaaaaaattatgtaaaatgaaataagccagacacaaaaggacaaatattgtatgatttcacttacgttagatatttaaaatggggaaatctggtttgccagcacagcaggaaaaaaaataaataaaagtaaaatacaaaaatcatagaggtgaaaagtcaatttggccaggtgccgtggctcatgcctgtaatcccagcactctgagaggctgaggcaggagaactgtttgaggccaagagttcgagaccaacctgggcaacatggtgagacacccacccccaccacctctaaaaaaaaaaaaagaaaagaaaataagtcgattagaggttaccaggggctgggcggaaaggagaatggggagttattgcttaatgggtaatgagtttctgtttggagtaatgaaaaaaatttggaaacagatagtggttgacagctgcacaacaacgtcaaatgtaattaatgccaatgaattatacatttaaaatggttaggctgggtgcagtggctcaggcctgtaatcccagcactttgggaggccgaggtgggaggatcacctgaggtcaggagttcaagaccagcctggccaacatggtgaaaccccatctgtactaaaaatacaaaaattagccaggcatagtggcaggcacctgtaatcccagctactcaggagtctgaggcaggagaattgcttgaacctaggaggtggaggttgcagtgagccgagatcgtgccactgtactcaagcgtgggcaacagaacgagactccgtcttgagaaaataaaataaaataaaataaaataaaatggttaaatgggaaatcttaccttatatacattttcatatatataacatacacacacacacacacacacacacatatatatacacacacaccacacacacatacaagtatgagccaccacacctggctaaattgacttttcacctctatgattttcctattttatttttatttatttttttccctgctgtgctgacaaaccagatttccccattttaaatatctgatgtaagtgaaatcatgcaatatttgtccttttgtttctggctcatttcattttgcataattttttttcaatattcatccatgttgtagcatgtatcagaatgtaattcctcgtttatagctgaattatatatatgtttatttttaccacagtaaaagaaattttaggccaggcatggtggctcatgcctataatcccagcactttgggaggccaaggcaggtggatcacttgagctcaggagtttgagaccaacctgggcaacatggcgaaaccctgtctgtactaaaaatacaaaaattagccgggcgtgttggtgcacgtatccatttcagctacttgggaggctgaggtgggaggatagtttgagccagcgaagtccaggctgcagtgagctgtgattgtgccactgcactccagcctgggtgatagagccagaccttgtctcataataataataataatgattaattaatttaattaattatttttttaaattttttattttttgaggcgcagtttcagtcttgttgcccaggctggagtacaatggcatgatctcggctcaccacaacctccgcctcccaggttcaagtggttgtcctgcctcagcctccctagtagctggtattacaggcatgtgtcaccacacccggctaatttttgtatttttagtagagacagggtttctccaggttggtcaggctggtctcgaactcctgacctctggtgatctgcccacctcggcctcccaaagtgctgggattacaggtgtgagccactgcacctggctaaaaaaagaaatttgtaatgaaattgacttcaaaataatttaaaagttaagaaaaaaaccacattacacaaatatgatataaacttaaaagaatgacataaaaaaaaacacacaagagcaaaaaaggacgcaatgaaatatggaaactagtgaatggaaacagtgaaatgacaaaataactaaataaactagtagcaagatacctgaaaggaaaagttgactgccaatcaaaatacgttgctgggtgaccaagaaatcaaagttaagagaggtagatattttaggagtatttcatccaggtcatagtaaaacccagtccaggaataaaacattgtatgtatctataccagccttgttttaaacaaaatctaaaatagcttaaacacaatacaacagaattaaaaattacaactaaggctgagcctggtggtgcctgcctgtaaccccacctactctggaggctgaggcaggaggattgcttgaggccaggagtttgagactgcccagcctggacaacatagccagatctcatctctaaaaaagcaataaaatgaattagccaggctgttggggcacatgcctatagtcctagctacttcctcagaaggctgaggctggaggatcacttgagcccaggagtttgaagctgcagtgagctatgagtgagaccccaaaatctctaagaaaaagaaagaaaaatacgaaggcaagtaaagagttagaaaaatcagataaaaccagtaagattagtataaacatcatgctgtgctgggggtgggggtcgcaggtttggaactgagctctctagaagccaattcaaagagggaaacacaatcatcacatggcttccagtgtccaaagtctcagaagtagtgagacagccaggtgggaggggttccctggagaaatgccaaccagcctgcccactgaggtggagcctcaggaagtttgtgccctttgcagcggggagcagcctggcccctcttcttagtgtgtggatcctgggatttgaatggcgggtgggaagcgctctagtagggactctggcctagcgacagtccctgtttctccgttttcttccttttcatccaataaaacccatctcattcaccattcagattgtctgcgagcctgaattttcgtggctgtgggacaaagaacccgtctttagctgaactaaggaaaagtcccgcaatagtaacacaactaatcctttccctgagaccaggaagcagttttcttctggtctcccttgaccagaaggggtgtgataaagtgaacaacgtctcaaccacaccactaccataaatacaagttttcataggatttattcatttcttcggtgttcctgttacagctggtggcaccatgttccggcagaatcagtcagatcagtgcagtcccatgctgtgtgtccgtgccactggtctggcttaattcagggatgaattctagtgtacatgaaacagacggcacacatattcttccatcaaactgacagaagaagtctctctccacccatcttttgatatgtagagcatgactgtgagttcagtgttattatacacttgatgtcacagccattttgaagctgctgattaaaagtaggttatggctgggcgtggtggctcatgcctgcaatctcttagggaggctgaggtgggagaatcacttgagcccaggagatcagcctgggtaacataccagaccctgtctctattaaagaaaattaagaaaataaaattaaaataggttacaacagaatactcatggccagaacatacctgtcttcatgttcccctgcagggaacaatgactaaacagctcatgattcttgtcccttgagccccgcttttctagattccataaaggccaccctcttctgcatccacattctttcttcagttggcgcctagtaccatggatttgatttttgcttccttaggtctagtctttatccatgcatacttccccttggctccctttgattggatttatttactccccaatttccttagcaccatctacagtgtcttttccagttagtgcctctcattcactgtgcacagactccccacaactttcattcgtaggtgattaactttcatgtaatgtcctaggaaaccctttactagctgtgtgactttaggcaaattacttaacctctctgagccatattttcatcatttataaagctcataatgcctaccttggaaggatgtttggaattaaagtaagttagaggctgggtgcagtggctcacacctgtaatcctagcacttttggaggccaaggtggtcagatcacctgagatcaggagttctagaccagcctggtcaacatggtgagacccccgtctcttctaaaaatacaaaaattaggctgggcacggtggcttacacctgtaatcccaacattttgggaggctgaggtgggctgatcacctgaagtcaggagttcaagaccagcctggccagcatggtgaaaccccatctctaccaaaaatacaaaaattagttgggcatgatggcgggtgcctgtaatcccagctatgcaggagtctgaggcaggagaatcgcttgaacttgggaggcgtatgttgcagtgagccgagatcgcaccactgcactctagactaggtgacagagcgagtctcaaaaaaaaaaaaaaaaaaaaaattagccgggggcgtattcccagctactcaggaggctaaggcaggagaatcctttgaagccagcaggtggaggttgcagtcagccaagatcgtgccactgcactccagcctgggggacagagtgacactctgtcactcaaaaaataacataaaataaattataataataatggtaacaacagcaaattgttattgagttcttatcgtgccagacacgatgctaagaatttcgtatacaaatatttggttgagtcatctcaacaagcctatcacatgggaactctgactatccccactttacagataaggaagatgaggcttagagagcttagtgctgggcccattagttacagtagttataattattcaatgtccttcaatgtcatgagaaagtcaccatcagcctgggagttcagtgggagggtcaggaaagacttgaacaatgagttgtttgcagatgaatgggcttttgtgtttgttttgtttttattataaacccagtactatacaggtctttgtaaaagtacaaagtacaaagttgaaaagtcctgaaaagcttctaccaccaaggaataaccgccgaaataatatctcatcagaactttctccatgaatacactttttaaaaattatcaccagcagtttcatggaacacgaatactctgtttaaaaaagagataagcttttatgtctatattactttattttttctgagtactattttttcccctgattttcaccgaaagggttgctctctatgttgttgtttcagcccttccagtagtttaaaacatgcatctttagttctagtctaattcatgatttcccttacatctatttaaagttataattttatttaacatcaaaggttattcagtagctttagtctttcccctgaaccaaacacatttatttatttatttatttatttatttatttttggaattggagtctcactctgtcacccaggctggagtgcagtagtgcgatctcagctcactgcaacctctgcctctggggttcaagtgattctcgtgcctcagctttccgagtagctaggattacagttgcccgccactacgcccagctaatttttatatttttagtagagatggggttttgccatattgaccaggctggtcttgaattcctgatctcaagtgatccgcccgcctcggcctcccaaagtgctgggattacagccatgagccactgcgtctggccaccaaatacattttaacttctttcctctttccattcctcttactgtacccttctaggattccctgggttttgttaaaagcttctggaactggaatgtagcaaatgaatgttccatttaacaggcagagaaagaggaggtgggcaaatcacagaaccaaagtgcagagtggtgaagagctccagttgcatgcagggtggggtggctgccagggccctggtgccttcagtcattagttctgcaaatgttcatgagttccaccagtggtgtctgcccagcagagagcaggagcaggggtgagggtgaggacaagagacagacagagcctggaggggcagtcagctgcacaggaacgaccttctgtgcaagctgcaggctctgcacccagccagtacctgagcagggtagaggtctgatgaactgacttataggatgggctggaggacgcagagcctgtgggtatgaggccagttaggagagtgctgtcaccacccaggcaggaggccatgaacatccccatatgagaaagaagggcataaacaggaaacaaatttaacaattaaataaaagcacctccctcatgcaggaaactcgccctgtgccaggccctgcagaaccatctgcagagtcatttcctctcttggcaacttggcagcccctagcaaacacaatgcatcttggcttgccatcagtgcaacccttgttcttcagatacaggtaaaatgccaaatccctaagaaggcctagaaggctctgcagtgtcagcaccagcacccccaccccttggcccctctctgtggtcactttcttgggtcctgcagatgctccaggctccactcaaattctattggattaaggctcaccctaatgacctcattttaacttgatgacctctataaagaccctatttcctaatcagatcacattctgaggtaccagggattaagatttcagcgtatcttttgggggtgggggacacatggtcacatcctgaatgactatagctcaaacaggtctttgttaggtgaaaataacaggtggaaaaatcactgagcacttcaccttatctcaaacttatgacttcaaaatctctacagtggactggtttcccagctgacctcaccttacgtggagtgttgcccaattcacactctccagccttccccacactgactttaacttccacatattccttcacttcattcctgcataaacctgggtatggtcccttcattgtctctcagtgatgtggaaagttttcatgatgagtctaccctgctctctctaatgcaagtaggatacaacaaacagcatgttaagttagcaaatttgacattaacgtctatcttaaaaagtggccaactatgggccaggcacagtggatcacacttgtaatcccagcattttgggaggctgagatgggcagatggcttcagcccaggagtttgagaccagcctgggcaacatggtgaaaccctgtctctatttaaaaaaaaaaaaaaaaaaattagccaggcatggtggtgcacttgtagtcctagctacttgggaggctgaggtgggaggattgcttgagcctgggaggttgaggttgcactaagccaagatggcaccactgcactccagcctggcaacacagcaagactctgtctcaaactaacaaacaaacaaacaaaaaagtggccaacagaggaggtagtagttttgtcactagctgtcatgtggaaccccaggacctagcctttggtttcaaatactgtttttcatttatagaaactaggaccccttagaatgcaaggcttaggtgacaactgattccatgtctcagagaaggaaagaatcaggacaggacttgaatgttctgttgttgccatagagcaaggatgacttcaagaatgtgaaggacaggctgggcacgtggctcatgcctgtaatcccagcactttgggaggccaagacggacagatcacttgagcagaggggttcaagaccagcctgggcaacgtggcgaaaccccatctctacaaaaaatacaaaaagtagctgggcatggtgatgcatgcctgtagtcccagctatgtgggaggctgaaatgggaggatcatctgatgctgggaaggtcaagactgcagtgagctgtgactgtgccactccaatctgggcaacagtgagaccctgtcgcaaaaaagaaagaaaagaaagaaagagagagagagagaaggaaggaaggaaagaaggaaggaaggagggaaggaaggaaggaaagtaagtcaaggacagtgcttaaaaagacaaaggagccaatttcaaagagctcccattgttcaagttgacagtcgggcatgaaagaaagaagatgggaggaggaatgataattatggttaattgaagtaaattgaatctgtggcaggccatgaaatcacgataataacagataaaaattcacataaagggcacaaaagatgactgtaatagagaagaattgagttttaaaattttattttaataaaaagggaactattcattttgtctcttctattaattatgtgtctgtttataaagcaaagataggtgcttgcttttgtctgtgtaagcagaaaacccacagagaatgctgagaaagccaagtagccctgttatagtaggcagctagtcaggcacgagcagagcaggagagggcttcctaccacacacacccaccaggaatgccaggcgagcatcaggtgatggccaggcggttattaactgtttctctaaaataataactggtagcagctggcgccagggacaggcagatcccaatagatagaaaaaacctgaaactggtgatcagcagcttcctgataagatctcaggagttgggcgagtggactcaagcatgctcactaagaggcaaaactgtggagtttaactggtgtatgtccttcctctacgaattttagactggcaagggaagaacgcctcaagtgagcatgcgtacaactccagtaaacacactgtgcatgccgccctttccaagggctagcagaccactgcacatatggacagcccagcccaagggaagaatcaagggagaaggaacaccaagacccccgaagcatgcaatgtataaaacctcaagtcaggccgggtgcagtggcacacctgtaatcccagcactttgggaggccaaggtgggcagatcacctgagattaggagtttgagatcagcctggccaacatggtgaaaccccgtctctactaaaaatacaaaaattagccaggcttggtggtgcacacctgtaatcccagctacttgggaggctgaggcaggagaatcgcttgaacccgggaggcggaggttgcagtgagccaagattgcaccactgtactccagcctgggtgacagggagagactccatctcaaaaaaaaaaaaaacaaaaaacaaacaaaaaaagacccaagtcaaaagatcaaaccacatacttgatctctaaagtcgtccacttggccctcttccaaatgtactttccttcctgctctaaagccttttaataaactttcactcctgctctaaaacttgcctcgttgtctcctgccttatgcccctcagtcaaattctttcttctgaggaggtaagaattgaggttgctgcagacacctacggattcaccgccagtaacagccctgctgtaaatatgaatgttagcagaaataagaacgtctgacatgagatgatgtcagaggcaataatgaaagagaagggagtttcaatagtaggtaccaagacaataaattaaccaaaaatatcactaaaaagaagagctaaccaagtcaacccaattcttcatcttctagaatattgaatatttaaattgccctactagttataataaaatacaaataagatatgcataagatttaatactgctaacagatcaagtcagtatatcataatgagagaaaaattcattatgtaataatggtcaagagattattgaagtgtgttatattagggggagaaaatatgttgtgagattcttgtttgtttttttgtttttgttttttgatacgaagtctcgctctgtcacccaggttggagtgcaatggagtgatctcggctcactgcaacctccgcctcctgggttcaagcgattctcatgcctcaaccttccgactagctgggattacaggcatgtgccaccacgcccggctaatttttgttttttcagtagagacagggttttgccatgttggccggactggtcttgaactcctgacctcaggtgatccattctcctcagcctaccaaagtgctgggattacaggtgtgagccaccgtgcttggcccgcaaaattctaaaatttatgtaaaagatgtgtacctaactaaaagcagttatattcctcagtgagatataatttcacacccactaggctggctatagtaaaaagagagataataagtgttggcaagggtgtggaaaaattggcactctcatgcacagctgttggacagtgaaatggtacagcactttggaaaatagtctgaccattcctccaaaggttgaacatggagttactgtatgactcagcaatcctacttctaggtttatagcccagaaaaatgaaaatctatgtctacacaagaacttgttcacaaatgttcatagcagcattattcataatagccaaacaacaacgacaacaacaacaacaataaaaaatggaaatggcctaaatgtccctcaacggatgaatggaaaataaaatgtgatatatacagccatacgctagaataaaaatgaatttgaaaataaaaagaaataaagtactgatatgtgctacaacatggatgaaccttgaacacattgtgctaaatgaaagaagccagtcaaaacgacaccatgttgtattattccatttatatgaaatgtacagaataggtaagtccttagagacaaaaagtagatgagtggctgcttagggctggggtggagtaggggagggttaggagattgggagtgactgctcatgggtttgggctttcttttggggttgatgaaaatgttctgaaattgattatggtgttggttttgtaactccatgagtatactaaaaactactccctggttttgtacatttatttatttttatttcattttattattatttatttatttatttatttatttattttgagacagagtttctctcttgtcgcccaggctggagtgcaatggcacaatcttggctcaccgcaaccttccgcctcctggcttcaagcaattctcctgcctcagcctcccaagtagctgggactataggcatgcaccaccacgcccggctaattttgtatttttagtagagatggggtttctgcatgttggtcagactggtcttgaactcccaacctcaggtgatccgcctgcctcagcctcccaaagtgctgggattacaggagtgagccaccacgcccggcctcattttattattttattaatgattttttaattttgtgtgtacgttgtaggtatatatgtttatggggtacatgagatattttggtgcaggcatgcagtgtgtcataatcacatcatggaaaattgggtatccatcctttcaagtatttatcctttgtgttacaaacaatgcaattatactcttgtagttatttttaaatgtacaattaagttattatcagctgggcgcagtggctcatgcctatactcctaacactttgagaggccgaggcgggcggatcacctgaggtccggagtttgagactagcctggccaacatggtgaaaccccatcattccaaaaaatacaaaaattagccaggggtgttggtgcatgcctgtaatcccagctacccgggaggctgaggcaggagaatcactggagcccaggaggtggaggctgcagtaagctgagaaggtgccactatactccagcctgggcaacagagggagattccatccgaaaaaaaagaaaaaaaaagttattattgactgtagtcctcctgttgtgctatcaaataccaggtcttattcatgctttctaactattttttttgtcccattaaccatccccacgtgtcccccatagctctactcttcccagcctttggtaaccatccttctactgtctctgtccatgagttcaattgttttgattttagatcccacaaataagtgagaacatgtgatgtttgtctttctatgcctggcttatttcatctaacataatgacctccaattccatccatattgttgcaaatgacaagataccattctttttatggctgaatagtactccattatgtatatgtacattttctttatccattcatctgttgatggacactttagttgcttccaaatcttggctattatgaacagtgctgcagtaaactatagttattattttctattggttcatcatttagtctttctactttaagacaggagtagtttacctaccaccattaaattattatactattctgtgtttttctgtatacttgctattaccagtgagttttgtaatgagatttattctcattcattaacatccttttctttcagattaaagagctcactttagcatttcttgtcagacaggtctggtgttgatgaaatccctcagcttttgtttgtctggaaaagtctttatttctcctttatgcttgaaggatattttcactggatatactattgtagggtaaaagtttttttccttcagcacttgaaatatgtcatgccactgtctcctggcctgtaaggcttccactgaaaaatctgctgccagacttattgacgctttgggagtttgatcattaaatgccttgaggtagtctttgagtttaatctgcctggcattctataaccttcttttatttgaatgttgatatctttccataggtttgggaaattctgttatttctctgaataaactttctatctctatgtcttctgtacctcctctttaaagccaataactcttagatttgcccttttgaggctgttttctagatctcgtaggcatgcttcattgttttttattattttttcttttgtctcctctgactctgtattttcaaggagcctgtcttcaggctcactaattcttctgcttgattaattctacaattcagagattctgtcttttctgaaagattaaaataaataaaattttaaaaaggctgggcacagtgggtcacacctgaaatccaagcactttgaaaggccaaggcaggcggatcaactgagatcaggagttcgaaaccagcctggccaacacaacaaaaccctatctctactaaaaatacaaaaattagccaggcgtggtggtgggcatctgtaatcccagctactcgggaggcggaggcaggagaacctctcgaacccaggagacggaggttgcagtgaactgaaattgtgccactgcactccagcctgggtaacagagtaagactctgtcccccccacaaaaaaaaaaagaaagaaagaaaaggaaaaaggaaaaagaaaaaaaattttcaaaaaaattttcaaaagagtcgtacattcttcagcatgtccattgtatttttcaactattgaatttctgcctgattctttttaattatttcattctccttgttaaatttatctgatagaattctgaattctttctctatgctatcttaattttttttttttggagatggagtctcactctgtcacccaagctggagtgcggtagcgtgatctcggctcactgcaacccctgcctcctgggttcaagcgattctcctgcctcagcctcctgagtagctgggactgcaggcacgtgccaccacgcccagctaattttttgtatttttagtagaaatggggtttcaccatgttagccaggatggtctcgatcccgatctcgcgatccgccctcctcagcctcccaaagtgctgggatttcaggcatgagccaccgtacccggcccttgaatttcttttagtttcctcaaaacatctattttgaatgatctatctgaaagatcatatatctctttttctccaggattggtccctgatagcctatctagttcatttgatgaggtcatgatggtattgatgcttataggcgtttgtcggtatctgggcattgaagagttaggtatttattgtagccttcacagccctgggcttgtttgtgcctgtccttcttgggaaacccaataatgctgtggttttgcagactcttagaagtactgccttggtggtcttggataagagctggaagaattttctggattatcaggcatagactcttgttctttttgcttactttctcccaaacatacagtctctctctctcttgctgagccacctggagctgggggtgtggtgacacaagcacccctgtggccgtcactgggactgcactgggtcagatctgaagccagcacagcactgggtctttgccagggccttcccttcagggcaacaagttcctctaggctaagagcttctccagagatgctgtctgggagccagggattggagtcaaaaactttggtaatttacctgatgttctgttctactgtggctaagcgggcgctgacaccacaatacaaagtccctcccactcatccctcccctttccttaggcagaggagcctctccctatggcaaccaccaccaccagtccacagcaattctgccagtccaccaccaatgttcacttaaagcccaaaggtggccggctgtggtggctcacgcctgtaatcccagcactttgggaggccgaggcaggtggatcacttgaggtcaggaggtcaagaccagcctgaccaacatggtgaaacactgtctctactaaaaatacaaaaattagccaggtgtggtggtgggtgcctgtaagctcagcttcttgggaggctgaggcaggagaacctcttgaacccaggagacggaggttacagtgagcccagatggtacaactgcactccagtcagggtgacagcaagactccgtctcgaaaaaataaaaataaaaattaaagcccaagaactcttccatcagcttgtggtgaatgttgccaagcctgggacttacctttcagggcagcaggctcccctctggacctgccatgagccagaggggcaggtccaggacagaatctacacctagatttggggactccaagagactgcttgttgctctgccctaccatggttgagctggtgcctaaggtacaagacaaagtcccctttacttttccctctgcttttctcaaactgcaggagtctttcaccatagccaccatagctgggaatgtgctgggttactgctgaagacagcatgtctcagagtctcacccaaggcccacagtgtactacctggttattgctgctagttatgcagggcccaggggctctttagtcagcaggtgatgaatcctgcaagtactgggcccttctcttcaaggcagcagcttcccttttggcccaggtatctaaaaatgacatctgggagttgggcctggaatgggggcctcatgacttggcccagtgccctatcctactgtggctgagctggtatccaagatgcaagaccaagtcctctttacccgttgctcatctctccttaagcagagggaaggagtcactttcgttgctaggagctgcactgcctgggattggagaaggggtggcacaagccctcccttagccataccggctggtgtctacctaggtcaagtgcaaccctagtccattggctgtaagtccagccgagcactaggagttgtctaggaattgcagtccttgggtcctagactgccttttcttttttttcttttgtggaaatatggcctccttatgttgcccaggctggtctcagactcctgggctcaagtgtccctcctgcctcagcttccccaagtgctgggattataggtgtgagccaccgcatccagcctagactgcctttcaagtttacctaggacaccagagcactttggcccatggtggtgaggcttgcagagaaactcaagttccaaccactgggacaggtgatttccctctggctagggctggcccagatgcccccctccacatgcaggtgccggtcgatcccagcatgactttgctctccgctatgacagtgcagcagtgagttcaatataaagtcccccaccccatgccctccctccccaaaatgcaaagactctctttccacgctgcagggacactgccagggaggacggaaggggcgtcacaattcaagactgtctctcctgccctcctcaatgtttcctttagtgatatgaagttaaatccagttactgtgattgctcacctgatttttggttcttgtgatgatgcttctctgtgtgcagatagttgttaaaagttagtgttccaggctgggcacagtggctcatgcctgtaatcccagcactttaggaggctgaggtgggaggatcatttgaggccaggagttcaagatcagtctgagcaacatagtgggaccccatctctataaaaatttaaaaattacccaggtgcagtggtgcaggcctgttgtcccagctacttggaaggctgaggtgggaggactccttgggctcaggaggttgaggctgcagtgagccctgatggtgccactccacttcagcctgggtgatagaggaagactctgtctccaaaaaataaaaataaaataataataataattgcattcgtaggccgggtgcagtggctcacacctgtaatctcagcagtttgggaggccaaggtgggtggatgacctgtggtcaggagttcaaaaccagcctgaccaacatggtgaaaccccatctctactaaaaataaaaaattagccgggcatggtagtgcacacctgtaatccctgctacttgggaggctgaggcaggagaattgcttgaacccggaaggcagaggttgcagtgagcagacatcgcgccattgcactacagcctgggcaacaagagcgaaaatccatctcaaaaaaaaaaacgcatttgcttcttagggggtttcagacatttaagagaatcctatgtattaaatgcaagattttttttttttttttaagatggagtcttgctcttgtcacccaggctggagtgcaatggcgcgatttcggctcactgcaacctctgcctcctgggttcaagcgattctgctgcctcagtctcctgagtagctgggattataggcgcttgccaccatgcccagctaatttgtatatttttagtagagacagggtttcaccatgttggtcagcctgttctcgaactcctgacctcaggtgatccacccgcctcggcctcctaaagtgctgggattacaggtatgagccactgtgcccagctaaatgaaagattttaattaaatgcttaaatgagtttaagtctaaaatcaatatttaggccgggcgcagtggctcacgcctgtaatcccagcactttgggaggctgaggtgggtggatcacaaggtcaggagatcgagaccatcctggctaacacggtgaaaccccatctctactaaaaatacagaaaaattagccaagcgtggtggtgggcacctgtagtcccagctactcaggaggctgaggcaggagaatggcgtgaacctgggaggcagaggttgcagtgagccgacatcacgccactgcactccagcctgggtgacagagaagactccgtctcaaaaaaataaataaataaataaataaataaataaataaataaataaataaaatcaataatgtgttttaatcagtttggattattaaatccataaatgtctatgtattagttgtgtacatagtgtataaatagaagaatatttaatgcttaaatgctatttgtttaataaattcataagagaaacaaaattacattaagtagaaataccttaatgacatttagacactgagagggtgtcccaggaaaagagaggggcacctgaacttgaaggctggtgacagatgtttaaggggccactaacataccagatagattttatcttcctagactcatcatctttgcacctattaatcatgaacagagttagttctcctgaattcatcatatgaaaatgtcacagtggacagagagactcaagagaagtgagttttgactgggtgagtcaagagggattatggtcctgagtagccagggagtgatttaagtacgggattcagagaaaggagggacagaggaagaggtgctaaagaaacaaccctctggccgggcggggtggctcacgcgtgtaatcccagcactttgggaggctgaggcgggcggatcacgaggtcaggagatcagaccatcctggccaacatggggaaaccccgtctctactgaaaaatacaaaaattagctggggatggtggcacatgcctgtaatcccagctactcgggaggctgaggcaggggaatcgcttgaaccagggagtcggaggttgtggtaagcagagatcacgccactgcactccagcctggcaacagagcgagactccgtctcaagaaaaaaaaaaaaaaaaagaaagaaagaaagagaaaaaaaaaacacctgctgcatcagtcacaactgccatcctgaggccaagaagaactaaatggtctcaaaattatttcacaacttgttgctaccacctttccacagtggggcttgtctagccagagaatcaaacattaattcactttaggctggtcatggtggctcatacctgtaatcccagcactttggaaggccgaggcaggaggatcacttgaggccaggagttcaagaccaacctgggcaacaagcgagacccccatctctacaaacaaacaaacaaacaaaagagtaagcacgtcatacacatcatagaattctaagaactgaagtaaccttgtaacatttagttcatggtaaatacataaaggaaactattattattatcacccaacagtgtgtgtgtaagtgaaaaatgtcttttttactgacaaatggctaagtgaatgctgtttgtttgagggatgaaatatttaaatgagaagccaactcaactcttcctcttgatcttagagtcattctctcaagtgtaactcccagtgcaaagcatcacatcaacttatcaatcgactgtgatgtcaactacagcctctgcaccagaccagccctcctctgtgggacgaagaactatcctgtggtcctgccaggactgcctcactgggacaacgcactgcattaggatctatcccttacgatggctcagggttttccagtctctaaggcaccttatcattatcttacctaaacttcctaataatcctgtgagggaggctggacatctgctttcatcccatgttacagatgagaaaacgaaggtccacagaggtcaatgacttgcctaaggtgacctggcacagaaagttgtgtggcagaaggggaacttctgtttcctaacttctggataagcgccctcctaggataggagaaatgaatgactcttgctactccagccaccacttccactaattaaccactaataaaaatgtaaaaatcagtatgccagcagtagtccctgttgcaaacattaggacctttctcatatcacagattactgaagacattccctctctttttgttgtagttgttgttgtttggtttttgggtgttgtttttgttgttgttgttgtttttctgagatggagtttccctcttgtcacctaggctggagtgcaatggtgcaatctcagctcactgcaacctctacctcccaggttcaagcgattctcctacctcagtctcccgagtagctgggattacaggcgcccaccaccacacctggctaactttttatttttagtagagacagggtagcaccatgttggccaggctggtcttgaactcctaatctcaggtgatccaccctccttagcctcccaaagtgctgggattacaggtgtaagccgcctttcttttcttttctttttttttcctttttagtcttgccctgtcacccaggctagagtgcagtggaatgatcatggctcactgcagcctcaacctcccaggctcgggtgatcctcccacctcagcctcccaagtagctggtaccacaggcataacaccatgccaagctaatattttattttttttaaagtttatttttgctcttatgatgatgattttttttttgagacagagtctcactctgttgcccaggctggagtgcagtggcacaatctcagctcactgcaacctccatctcccaagttcaagcaattcttatacctcagccttccctctagctgggattacaggcgtgcaacaccatgcctggctaatttttgtatttttagtagagatggggtttcaccacattggccaggctggtctccacctgccttggcctcccaaagtgttgggattacaggtgtgagccaccatgcccggcctactcttaattttttttttaagtgctcaagctaattttttaattactatttgtagagatgaggtctccctatgttgcccaggctggtctagaattcctgggctcaagtaatcctcctgcctcagctcccaaagtgctgaaattacagacatgagccaccatgcccagttccaccattttttaagcaacaactaacgttaatccaaagaccaccctgaggggactggccacatccccctgggaccctccactgttaaagtccatcttccctgagccatcagcaccaagcatcagatgaacttcactgccctggctcagtgttgcctgtgtgtgagcctcagctccccatcctctctgggcctcagtgtcttccctgtgcagtatgccccgcagtgcccacccaatggggttgttgtgaggatttgctggaagggtgtgtgtgcaagccccttgtccaggacctggcctatatgtaaatataataaaagttcgttgttatttctgttaattgcatattgtacttgaatactccctggacagataatgagaaaaatgaggtttgagtcaccacccctgtcacttgtaaccctgtgtgacttgcttaatccctctaaatctcagttcctccatctgtaaaaatctttttttttttttgagacggagtctcgctctgtcacccaggctggagtgcagtggcgcgatctcggctcactacaacctccaactcccgggttcaagcgattctccagcctcagcctcctaagtagctggcattacaggcaccatgcctggctaatttttgtgtttttagtagagatgaggtttcaccatgttccccatgttggactaggctgtctcgaactcctcaggtgatccgcctgcctcgttctcccaaagtgctgggattacaggtgtgagccaccgtgcctggccgcaaaaatcttataatgccttcctcacagagaataatgaaggttaaatgatgaaacgcacagagcattttaatgctgagaagggcttcatgaggttgttgaaaaatgtcagtgaggctctgggagggctacagccggagtgtagattagactctgggtgtagccgcatggctcaggaattgagtggaagaagagagatgatgagagagggggagggacagagagagaggatcagccattccttcgtgcctgctgagtgcctgccctggtccagaccctgttctttgtgctgggggtgcagcagtgaactaaagagacaaagcccctgtcctcgtggtgcttatgctctagtgagtctgtggaacagagcaggggactgttgacaccaaatttaaatgtgcgaataggaatgactatgcagaagaggccaccaggaagagggacagagagaaatgagactccaggcttgatagaatgaccttgggctggtggaagaggcaggtgctgaaaacaggcatggaaccccttgccctagggcagggagaaaccaagagagtccaagctgggaaaagaatcaggtgaggaggttgaggtgttgacgaagggagtgtgcttggtgatgggaaaggtgggctctgaggaaggtgttccaggaaggacttctcagtgtaggatggagccttatggcagacgctgggaccgggcatcttctccagaaatgcccatctgccactcaggcaggcaggcaggcagctccctaccccttgagttctggtgtttttcctactcctttctcccctcccacaagctgcccaactcccagggacctgactggatggagagtacatacacctggaccactgcaggcatggcacagggaagagagaatccagacccaaatcacctccaacccacacctgctgattcttccgtgcttttgtagcctgacccttcgctgccgtcactccaactcctgtgtgaggatgttgagctcctgggaaaaccgaagggagggcaggagagacaatactgtgaccaaaggctgagactgtgtcatcacttgggaatgaaagcatcaaatgccaccccaggtgggattgttggcttcaaggtttttttctccctttcctttctcccttttctcttttcctttatcgaggtctgctatttactcagcaactcttcaaagtctgtggttctgtgggacacaatgtgctaaatgatgcctgtaagggaggaggtcgatgtacctccacttccaagaagcttgactttccggggaagaaaagacaagtgaagcgtagacattgcgacttttggcttcctgtttctgtgagttgcaaggaatcctgtccacctggccctggagccgccttctgggacctcatccttgccccctgctgcaggtgccatctcaattagtcctgctgtccctcctccccctttcagattccagcacaattctggaacagctctcccacctggccggggtgagactgaggctccaccctcaagcacttgggcactgatcctttgtgaaggatggggatagcaagacagcgtctgcaggggcccctagagggccgtggggatggctagaaaacaggaatgaacagactcacttcagcttatgcccagactcacttcagcttatgcccagaaacaaagaaaccaaggagaagcaaattccataagtgcttttattttattggagatgagcaggggaggcactgaaaagtggggatagtgctggaaacatgctgacagggcctggattgagcccacacagcaaggggcgggagcaggactctaactcccaatgttgggtttccctctatcgtgctctagccccactgcaacctagggcttggaggattagggaagccagctgggatgttccaagaagagccaggagggcggaggactccaggaggaaatgggttattgatacctgggtatagatgaatattcccccagctgcctcctggataccgattaatattcccccagctgcctcctggataccgattaatatttccccagctgcctcctggataccgattaatatttccccagctggtacctgggggttgattattgataccccagattccctcagggtgtggcatgggcctcgttccccaaccagtcccagggcctccacctccccaggacacactgggattcagggtaccccaggggtgatcaggcagaaccctgtggatgagagaccagggagggcgttgggaaaggatttttcccccggctcccagtgaattagaacggggcagtcgtctggactccgagtcctggtggaggagtgaagccttgggtgagaggcctgtggcatcgggagaagactccccaggcaaagggccactgcccggagcgagggccgcagcactggagaggtaagagagttcttcaggcagcgcttcccccaggcggtcctcagccgcagcagccatcatctgccaaggatcctcagggggccaggaatccatggcaggcagcccccacgatggaggccacctctgcactgcagaacctcctgcaggtgggaagccatctgatgcaggcacgctgagcttcagaggaacccttgccaagtcattagacctagggtccagagcgggctgcggatgttcagagttagaggggccagtggaggaaggttgtccgagctgaggcaagttggtccccaagttttgggaaactttctcctccacaacaccgatgctccgggcaaagaggcctgagggaaagggaagataaagcaaccagtggtctccagtccccgagtccccagttccctttgcttcccctatgcctattcttccttttccctcagggacctaaatgtgtaccctcctgcctttacccctttccttaattcctgtttcctgggggacctccagtccctcctgcccaagggcatcacggcctccatacctgggagatgaagacagaccaggagcaggcccagaggagcgcagctccctgccacgcggccctgcatcctgctcagcacccgatctccctcagccccaagacagccagccctttatcctggtagtggggtgggggacagcagaaacaggctgggctagtggttgtgaagacaataaacctccacattccaccctcattcctaatgtggtctgtggcaacaggtgtcacttgaatgaatgtcccagaggaagctgggtgtctcccgccctggctcctttccttgacctccctgccccttcttggcccaggtgtcctggctcacagctcatccctggttgccagcctccccagccctgcttctctatacacaaggacctccaccctggggtcccactctcttaattgcctctctcagcaacagaaacacttgtttctttttgggagctggattgtttcctcccagcacccctttctcatgcatcctcatatctccttcaccttggccccaacctgcaggaggttctggggtgcagaagtggccccatctgaggagctgctcctacatgagaccctggatctagctagggaaatggacctggatgccatccttatgagatactgactaattcctgctgctgcagtgacaaattaccatgaaccgaatggcttacaacaacatggatttattactttacagttttggagatcagaagtctaaaacaggtctcagtggattaaaataaaggtgtcagcagggctgtgattctttctgggggcctcaggggaaaatccctttccctgctttttcaccttctagaggcatcctgtgttctttggctcatggtccccttcctccatctccaaagccaaaatcagccatttcttacactgtatcactcagacttcctcttctgcctcccatgtccacattaagggacctggtgactacactggacccacctgaataatccatgataatctctgtgaagtcagccgaatagcaaccttaatcccatctggaaccttaatttccctttgccatgtaacctaattcctacgttccagggattaggatgtggacatctttgatggtgttggggttgaagacatcattctgcctgctactggtggtcagatgtgccacagagtataagaaaccttgggagaaagtggctatttccaagtaacagtagaggagagcctttaaatgctgctgtcaaatggccaggacttgatccttgttgaagctgggcgatgagaatgtagagattcattaacagtttgttggcttttaaatatgtttgcaaattttattataaaaatgcaatggctttgttctctccatggcttccgggaggccccaggagtaggcttccctggctgcccaaggtctaaacatgagctgttggctgattctactgctgtgtcctccccacctgcccctgctggcttaaccactggaggagtgaagagctcctctccagaactggcagtggatggagcccagaggcctttttggatgacatgcatgagttttacacaagcttttaatttggagcacagcaggagactcgaggaaacaccacatcagagagccttctctccctgcaattcccattcatgaagcatctgaggacctcgattcctgccattggctgcagatcaggggccagatgctggaccaagggtgattcaatccctttctggtcaatgtaatacatttttgctgattccagacttggagtttcaacagttctaaattcaggaccagacagcaccaccctgataggagggaatgggttaagtgctacagtaggggtgaattcctttgcagccaagcagaggctctgagaggtggcctggggtggggggtggggctcctacagggacaagcacaatccactctgccctccttgggatgcgggaacttcgtccgcctcagcctctccctgcctgtctcaggacttaagtcgcatggaccccaccacacactccactttctctctcttctccagtggaagcgactcctctttcccactggggcactctgccttctcagccctcacctgagagccatgttgctcacactctcactctggaccccagcagagcagggagtgtgaagatggagagaccactggcagctctgttctgccacaggctgggcctcttgatctaggccagtgagtcaccctgcttggctgcactccctgccccgctcccatcctctcagtcctttactctctccacccccagctccaggaacaacgcccaactggcctcctactcagctgacaggaatctggttggagttgttgtgtcccagccttcccaagcttccaggtgtcccagaaacccaggaaatcgagactcatgactcccagagaggatggcatctagaaggtgaggaatgctaatggtggaagaaaaggagtttgggtggggaggggaggggaggggagggagagaaaacactgagggccctaaataaggggaagggggaccccacggtgaatgaggaatgggaagagaatggatttcctggagcaatgagagaggagggaaatggcggaaggatctgggaggccaggcaatctctgctttcagttcaacaaatatttattgtcttcctcctctgtgggaggagctggaaggtagaagagaaacacagcccgcttttgaaggaaaatgagggacacagagacctctagaggcgtaggaagagcaccacccagactctcagaggagacccaggactccaagaaggcaaaaagtctgcacctagtccccacagtttactgagccatctgtccaggatccagggacagcagggagcctgctccaacctctgagggtgccccagtgtctccctcacccagggaatcatctgggcactgagggaaatggccacaggaaggggctgagataagggccttgagaggcaatgggtgtgttggggacggtgatctaggagggcgtggtgagctctgtaatggagggtggggtggaattgggagcgaaagcccagtggcatattgggtgggttgactagatgtcgaagagaggtcagtgaaaagtggccactgtttccagatgatggtttgactttgctttatttggtaaaggggaagaggaaggtataacttcttcaggcgtcagaggtgctctgagagcatttcaggggtttcccagttgagaaggtgatgggggtgttactcaatggaccatttcaacacagtagagggaattgtaaggggtggtgatctggctgaggggcactgtggtggaatgggaatttaaacagtaggagagaatcaagagaggagctttgaatctaccattttgagaagaggaaggaggaaggggtgataagagagagtctgcaaccttagggtagtagagaaagcagaaccactcttttgggaaggagggaaactgagctaaccctatgcctgggcactggccttctcccatatgggatatagtgtatgtgcttgtttgtgcccaaggcatgcacacacacaacagttgacttatggactgtcgagtaactctccttggggtaggaaaacttcagggtcagctagctggggccccagaggcttcacttgggctaggatatcccggatggagcggcaggggatctttccagcactgctggagccacagggcttggcaccagcggagggatcaggatggggagagccatcggggcccccagtcagtgtcaaggaggagacagacatgcaagggtgaccagaagagctggacttgctgccacaaggctgaaggatgattttgccactcgattgggaactggagctgctgctgaaggagccggtgcctggtggggagcaggggctctgggaagcactgccgcagggatggtagggtgaaccggagctgctggaaatgctagaactgctggggactcgagaactggagggagagcagggtcccttggagcccgtggagccgcctccacagagctggaccccaccagtccccactggctggaacgcaatggccgaggaagctgccgactggctggggatgatggggttgctggagaagtatttgccctcagagatggggggcccagctgcaaaggaagggacccctggagagcctttcacagggttctctttggtgaagtagcccacaggatagattttacccttactgtaggtcatgcctggaaccagataactgtcagaggagccacccaccacctcgtagccaccataggatttgtctacagaggtgattgggggacagggcttgcctggaaggccaccattgctacaggggggaccttgaaccactccaggggcaccagaaccgtgctggtccaccaccaccaccacaggcctctgaccccctgacacagagtgggagctggggatgtaggggccagagtgcgagacgatgggccctccactgcagggagagtcggggatgtccgaactacagggacgctggttggagctgacgctttggccactgctggataccccagaggtttgggaagaggaagagctttgtccaggctgggaagggtttagtattccgcggtaagagttgtcattggttggcagagcagagccattccctacttggaagctgctgctgctgaactgaaagctgctgctgctgctcgaatgagagctgctgcttcccgagtgagagccgctgcttcccgagtgagagctgctgctccccagctgggaggaaccggatgcaccttgtagactagagccagatccggaggagtagctgacctgggaataccccgttcctggcttaaaagatcctgcagaaccaccctgggcaatgctggatccgctggagctaccactggagccaccaccagagcttctggcactggaaatggagctgccagaactgctggagccactgtagctactgaagccgctggagtcacccttcccagtgaggcaggggtcgttaggggaggtgatacgcgtggggtccttacaggggtctgagaaggtgccaatgctcttagccaaggtccctgtggaggaaagcagtggttagtaagggccaaagaggcttggcttcctccctcacctttctgccttatctcagtaatcggcctctcgggtttctcccaagcagagcgcagggagagtttagggatggagaaaggaggaagaactggctattgtctctaaaggatattgaggtggccgaataaaggcatttctttgtttgggaagggtgggcaaacaccaaccagaaaaatagaaaattacgtgccaaagtgagtgacctcaaaggaatacattgaatataagagggggctgggcacagtggctcacgccggtaatcccagcactttgggaggctgaggtgggaggattgcatgcgccccagagttcaagaccagcctgggcaacatagaccccatctgtattttgttttttaattaaaattttttttaaaaagaagagggaatggagaaggggcaggaacaaataggtctaaaagaaaggaccctgaagagacagagaattggggaaactgaggctctgaggagtccaggcgtaaattcttaggggaaaaatcctgggccagacagtgggaccagagggaagaagacaaaaggcaaaacaatggagggctgagaagtggagacacatatagaaggagacactggaaaaagacaaagctgggggcagaggggctgaaataaaggaaagggcactcgaggactaagatttggtcaccagcttcttcgtgagagcccaggctggggtcaggaatggaaaccctatttcctatctcagcactggccatgccagtaaagctgggtgggggccaggatgtggggtcactacctgttgcttcagaacctgctggtaccagtgtgtcaggacaccgcaccctgagccagccctgctctcgctggcccagcccagggaaccaggacgaaaccccacgaacctccgaggctcctggccacaatcagcttccctctctgagcacacctgcctctgtccagcccctcatctgacttctgctgccttgacttccctcagggatgtggagccacatctttccttatctttcctttcctttgctcaaaaccccaggcccaacttaccccatggttcctccatgactctttcacctgcgttccttctgccttccctagcccctccaggtcccacgtgttacaaacagagccacatactagcaagttactgaacctctctgagctttagtttatacattcagaggggccaaattttccctgccttcccacagcattactatgaagaaaactaaatgagatcatccacctggaagttttttcttcttttttttttttttttttttttttgtgagatggagtttcttgttgcccaggctaaagtgcaataacacggtctcagctcactgtaacctctgcctccttggtgcaagcgattctcctgcctcagcctcccaagtagctgggaccacaggtgcccgccaccacacccagctaattttttgtatttttagtagagagggggtttcaccatcttggccaggctggtcttgaactcctgacctcaggcgattcacctgccttggcctcctgaagtgttgggattacaggcacaagctatcatgtgcggccagatgttttagaaagtgtaaagcattatatattatgaattattactgccactcatcctgatccctccaccaacaaccagactgccatcctctgtgatgtccctgttctctcctcagaaagaaattctctgcatgcacctccacgccgaaccccagctgtgccaattcccttcagtcctctgcacgaatccaccatgcattgcctctctctttcgctattccctcagacaccaaccacccactagaccatgggaaggtcgcagaaattcctcaagggctataagtacccggtggtcaacaacacaggtccaggggttgcctggcctggggttgaaatcttggctttgctgccttctaatgcatgattttgagctagtttcctaacctctccgagcctcagtgtcctcatctgtagagtggaaatagcaaatctcttttcataccgttcttgtaatgatcaaaagtgctaatataggccgggtgtggtggctcatgcctgtaatcccagcaccttgggaggccgaggcgagcggatcacttgagtcaggagttcaagaccagcttgaccaaaatggtaaaaccctgtttctactaaaaatacaaaaaaaagaaaattagccaggtgtggtgatgggcacctgttgtcccagctactctagaggctgaggcatgagagtcgcttgaacctgagaggtggaagttgcagtgagccgagattacgccactgcactccagccttggagacagagtgggactccatctcacaaaaaaaataaaaataaaagttctaatatataatccaaatgtgcttaaaacagagtctagcatataaaaaggctctaaaaatgatattattactattaaatgtccaatcattatcttgtagtgctcccataataaaaatcaccaccaccatttatataaacctctagaatttccaaagtacatatcacatacattatttaatttgagacacacagactagaggtaggtgtcattaaccccacttcagaatttcagaaactggggctcaggaagtttaagaaacttacctgaggcgaccatacagtgaggagcaacccccagactcaaaaggcagattccagagcccctgcccgtccccttcgctgggtcctctcccggagtctccctcccgcctccctcctgttcccagggcccccagcctcctacctggcaggaggagaccagccagcagcagtgccatcatcccgtgcccacccacacgccccatccagggtgcccgagacgagcccatctcgggctgcacggcctcctgactgatggcagctcgaggacacctgggtcctttatgccagagctggacattccctgggcaggagtcactgtggggagaggaggagaggtggagggggtgggtgccccgggggaagttggtgtggccgggaggagcgtggtaatcagcccggtgcatctgcctactcagcagcagcagtggctgcagtgtggggtacccatggccacggggctctaacgatcctgccacctgacaggcctggccccggctcctcattgcctaacccggaaccaggcgctctgccccacggccacccactctggggcggccactcttgccacgggacccagctgcctggctccttaactctcctgcctaccgtggcttggcctgtctctccatctgccctccactcgcagtcgtgggtgtttcagctttttcttccacacttgggtgcccgctccagccccacccacccaaccccaatgaggtcccattcacagcccctgatctgctccttccttaggaccccatcactccacctccactttcctccttcaaatatgagttctgcccccatcccccaggctccccctcccaccactccccaagtaccaggccagccacatacctattacgtgttccatcacctggggaaccttctccttctcagaaatggggcaccacattcccaaaaccaactccctgacctgtcgcttctgggggcctctggggacggcatggtggcgggggtgggggggggtgctgggagccagggctcagccaggggaggggcctgggctgatgacctctgtcaaagctgggccttggttactcacaggccactcacagcccctccccatggctggtaacccagacctcaagggtgagcaagaggctaagaaggctaattgggaaggtggtggccccgtagcccatctgctggccctgggctggatgagcgagcaggaagcagcagccagctctgggcaggtcgaggagggccaggcaggctcccgggtcctcaaaggatgaaaggaggccaggagaaccggagccctgccatctgctgagagggtggtggcttctcctccattgcgttggcctccctcctgctctggcccctgccccgccccagccaattaattgctcactagtattgcgggagtatcagtatcggagggaggtgcctgcaagtccagcaagctgccctctcctcccccaggcctcagacacccctgctcccctcacccaaactcacttcccaaacctcatctcctcacaaaggcagctctgtccctgggccccttgggctggtctctcccattccctctacctcctgaccgccctttaagttcagaccagcaggaggatggaaatgtttcctgtctgtgctgtccgatacggtagccactggccacatggagcaagtttaaccaccaaagatttggagctttaattttaattaattgtaatgatgtggttggccacgtgcagctagtggctgccatctagtcttgctcttgacttgctagtgacactcagaatgggagtgggaggaaagaggggctgagggagctgtggagagaggaagggataggacagggtcccctgaagggggctaatgccttgggaaaaacaaacaaacaaaaaacactggcttcagaatgaagatgacgtgggttcaagtcccagctaacctcttggctttgggcggctcttcaaacctttctgaacttccatctcctcatctgtgaaatgggggtattttaaataacacttatttcgcaaggtttttgtgaacatcaaatgggaaattatcaaaaaggttaaatgggacaaggggtgcagtcccccagtaggaagcccagcaaatggagccctgcaggtgctcctgtcttcatccttccactgggggagacaaataggccagcttcacccccacagccccaggctccctttcctgagtctccagcccagccaatgctagcagagtgtcttctgctcccttcctgccttgtatagaggtgcaggcacaaatgtgagacagagataccatttaaagtgatgctgctcggctgggcacggtggctcacgcttgtaatcccagcactatgggaggccgatgcgggcggatcacttgaggccaggagttcgagatcagcctggccaacatggcgaaaccccgtctctaccaaaaatacaaaaaaattagccaggcgtggtggtgggcgcctgtaatccctgctactcgggaggctgaggcaggagaatcacttgaaccctggaggcagaggttgcagtgagccaagattgcaccattgcactccagcctgggtgacaaaagggaaactccatctcaaaaaataaagtgatgctgctctttccgaacatcatttcctcttgtgggcctccctagactctcaggcttggctccctggaggacctgggcaaggagggagggggcactggggtagtgaggggagtggcagagggcagggaggagtggactagaaggtgctgggccgtcccagggtgtgaggggagaaggcagcggaacagtggaatctgtggcttcttcttttccaacacaaacttcccctgaccagccagaggtagcaaagtttgtcttgttttctttctcacagtcctcctggctgccatcagaacttggccaagacagccaggctggaggaggcacagtctctcctggcctcctgccaggtctccagccgcccacgtggactggtggtgcagccacgtccctcctcctggctactctctcctgtccactcctgtccaccccatcctgccaccctgggctgcccagttcctctactgtcctgcccacctgtgggcccttgagctctaatctgccatgcttttggttttttactgaaaccctgccttctgtgctagattttactctggtgctcaccattaatctttctctcagtgcaggtggtgaagacctaaagctaatggggcttaggagggaagagaagggcatcagctgagtgcccacacaggccagggtcaccttcagtgaagctgccagtttggtgacgtccacagtactgcaggcagctctgctgtgttctacagcaacagattctggccctgcccctgcccgtgcccgtgcattggaccgggtgagaaagtgtgggtggcgtagacactctacacccgagaaaatcaagctcaaagcacatggcttccataggcaaaaggtggggctcccagccatgtattatgaagcaggcaggtcactgtcccctccggtcccctccacccctccagcagccctgtgctgctgtgtttgctgtgccagcctttgcccccagtgcacgctcctctgctgtgttttggaagttgcactgagaaagaagagaaattgttccttgccctgaggagctgccatccagctggggacacacagcgtaagagagcagcctagagtggagaagcgggtaggcacttggcttcagggaggtggcaggactttccccgggccttgaggaatgatgagagaagcacagagcaggcagccagacgtggggccttgtggtgcttcaggtgtatttagaaccagcggatggcgtgggttggtgtgggacatgcatgtggaggacagtggtgtgggagaagggacaggctgcttggatcgggattgtagatgacctacaacaccaggttaaaagaatttggattctataggaattgcagtaaatgtgagagggtgcagggaaccaaacggctttgaatgatcacaaagggggctgaagcatggcgtgctgtagtcccagctacccaggaggtggaggtgggaggaatccgaggccagctggggcaacttgagggactccataaagaggaggcttggggcacgagatccaccatgtactgactgcctgctgcaggcggacacggtgcctgggtatttaacatgagttgtcttgttcaatcttcacaacagccctacagggtaagtgctttttccccctgtttcacagatgagaaaactaagttgaaattatttgtccaaaccagctgctaacaagcaaaaatgtttgaaaaagattcaaacccaggcctgttggacttccaggcccacatagatcctattactctgcagctgacaccatgctataaatgaatggcagaggttcatggacaggcttaagaggctccctaaaccctgtaaggatgtgtgcaaaattccttatgtatatgaatatttctagagagaagatttctgctgtcaaagctggccaggtatggtggctcacgcctgtaatcccagcactctgggaggccaaggcaggtggatcacttgagctcaggagtttgagaccagcctggccaacatggcaaaaccatctctactaaaaatacaaaaattagccgggtgcgggggcaggcacctgtaatcccagctactcaggaggctgaggcaggagaatcatttgaaccagcgaggcggaggctgcagtgagccgatttcatgccactgcactccagcctgggtgacagagtgagactccgtctcaaaaaaaaaaaagtgaagagttcctaagtgaaggttactggctcatgaggtccctcctccacagctttcctcctctgggggcctgagagtcaggacagaagttctagcacaagtgtttcacataggggtccttggtagaccagggcttaggcttggaagaaggaaaatggagtgagcacgaggaagagaaaaagcctggaaaagcagcttattttgtgctgaggagagaaggaaaggggccacccagagctgctctggggctccagggcctgtgggctcctcccctcctttgttcctctctgcttggctccagcgagaggccatttcctctcctctctctttctccatgacacccacgcttccctgtggactcacctctgcagccacagcaacaccctcctctccttggcgtggaagccagcgctcctggcccactcccagtaggggatgtcctctgagttgtttttcctgtgcggggaggggtggactgagtcatccacactcttcacctggttcctctggtgaccaagaacatagaaggagagggcacatccccaatcaggtgttccgaacatctctgcggggactgaccctcctcagcccaggtgctcccatgggactggctacacttcttgactcagttttaatctctccttctctgccttcctgttgggaataccccctcacttctgtggcttctttcctgtagtagacgatcaagggtggaatctacagtccatgggccctgacttcttgccttcgtctcaaatagactctgcagccagccatctatgcagcgccccagtggctttgaaatgcaacagaaaccatcacccccggaccgtgggctccatgccagtgggcaaagccacaggtgcgttcactgagttcccagcacatagctgtggcaggcacttggtgatattttgaaataaaagaatggaagaatgtgtccaggctgtgcttcccctttctaccttactcagggacatggtgccctcctctctggtttcctgccctgtgcccaccccccaccccctgcaagcacagctcttatgtgcaaagcccctgtaggtgctggagggattcactgatggccttggcggaggtggcagtgggcatgtgcacttggctctgacacagccactcatgcaacaccctgtgcaatctcggcctgggcctgtgtgtcctgccctcattcctcgcgggtgactgtctcccctgagccactcttctctctattggattagctccttttatttccccctagggatgcaacacatttttatgaacaaacagcagtgttcacatggctgtgatgaggacgtactggggtttcccctggacatggcattcatctgatgccagtggtgggcaggaccgtgctgtatactttaaaaaaaccctagggggttctgttaggtgcccccactgcagcataacgagttgcccctagctgagaagccctgtcctggggcctgtccacaccatcctcttcctgagattattcctggtgtgggcggtgctcggctctacctttccttccttcttccctgcttggctcctggtccaatggctctctcctctatggaatggcctcctggagcttggctgggtcagcccccactttccactcttcccatgcctgtcctcaccctcccagcagccctgccagcctccgacgggcccagggcactgcagccggcacttgggagtgaagactggggccagagccaggctcacctttggccactgaatcctgaaagaggaggaatttggcaagtggggttctgcccaccaagctttcttccccccgctcccctgagtcttttcccttcacccccacttcccaaaagcagcagggagtcagctgtagggcagtcgctccctggccgaagccttcctggctgtttccgtcacaccctgaggccacccctcttatcttgcgaggagggaggcacacagaggctgtgattagctgtcacagtagcaagactgttcccctctctgtcctgcggagtgagtgtgagggaaaagagctctccttgtctgctcattatgtgcacctgttaaatagtcattctttccactagggctattagtggtttttattgttactggtcacccagaattagagtcacagcttcctcgacagggtgaaagagagcgccagggtgcagtctgaacgtgctctcgggagaggagaggccggaaagacttgtaccaggagggacttctaggctgggctggcccttggagcgcctaggaatgggactgtggtggcccatcttccctcctgtgttctgggctgtctgagtgcctctgggtgagagtcctcacaggagggagcttctcctactgcccagtgtctccctggcacctgaggcatcacccagcacacagaggtgaccaggaaacacagactcctgttagagaggcatctcgtgtcccgctctgttctcttgggccctgggactagaacatcttcaccagagaccggcgccgactccttggcagtgtgtaacattcagctcggtgccgaggtctgcccgtgcaggactgatctccattctctcaatgaccctaggagacaggaattattattattattattattattattattattattattattattattattttgagatggagtttcgctcgtagcccagcctggccaacatgatgaaaccccatctctactaaaaatacaaaaattagccgggtgtggtggtgaacacttgtaatcccagctacccgggaggctgagacaggagaatcacttgaacccgggaggtagaggttgcagtgagctgagatcgcaccactgcactccagcctgggcgacaagagcgaaactctgtctcaaaaaaacacacatacacacacacgtttgggaccatccctatttcctcgctctgcctaagctgcgtcacaccattcatcactaggtgacatcctactacagataccttgtaagcatctgtgtatctctctcctccctcactggaaggcagctccctgagggcagggccctgatccctttgactggctgtggtatcctctcctgtagaccgctggctcatgaaataatcagggagagaatgtgtaaatgatgatcgtgaggtccacttggacaagcagcctgtgcctgaattttcctgagggcttcagagcctgtctcgcctcgcctcacatgcctggctcaccttagaacggtcaccttgacggctaaagggacacctgtgtgccttgatggtggacccagggagtggatgacattagtgagggaaagagcaaaggctctggaggaaaacacctgagaggagtctctaggctgccctctggtggcagttcttggaacaagacctgagagccgctaccttggctctcagcattgcacgggagtttagaggttattaaagaaatccccctaaagtcccatcccaaggtcacatacagaatgaatggctaagtagcgacaagaacccaagtcacagtctgttgatctcactaccatgctatcctgcctgcccccatcacaggagttgagattatactgcaaaaggaaaggtggggatggggtggggactggggaatttggggagggaattgattactgcctctgaggatattagggggaaaaacccacaggaggtgcatttggcttaattcagcaagttttttgagttttgattcagtgccaggcacctggtgggcacttaattaaagattagcaggagaagaaaaatgtacagtaagagagcttaagtttataccaaagcgagtcttgggtctaataattttgaaacatgaaattggcagagaagttaggagtccctcctgggctcctacgtcagggtttgccccctctctaatttaactttttatcaaattttattgtcatgatgtatatgtttgtcctccctaaacacagagccccttgagggcagggaggactgaaactgcttcctgggactgtcaccatcacatagcaccccacagagcagatgctcaatgaatgttgattgtgtgggcaaatggatgaacaaatgaatggtttggagtttccctggccagagagcttcaaagcagggcagacaaccatctcttctgtctagtccaaagacatcattcgctgcccaaggctcagggctgtgcctggtgctttctcaaggtaacttagcttgtataattagattttaccgtgatactagttctaggttctttttttttcattggccaagcatttaataactatctgtcatgtccaaggttctgggctattgttctgtaaatctgtgatcctattctgttatttaattccgtgactctgtgttgacatagacgtgacggtgtccctggggcatttactcctaggtgagcttagccaaggcaggtagagaggaaccagcattgtctaatctgaatggataagccagcacaatgggtttccctgtgcaaatacctccataccatccaggcccactcagtctcctccccagctaatgaagacagcctgtttgagtgccaaaatccactgcctattaataggtactaaaatctccaattgccttatgcctcccccttctctttcccactcacctacctgccatgtcagcctgggaagaattggtttgcagccaggcagtcctccatccagtcttgactttggcacttgtgatatgacttgcacaggtgagttacctctctcagtgttggttcctcgtctgtgaaatggggctaatcatttgctttattgagtgccttctaggctgggtactaggagagaaggaagggatacaaagaaagacaaggcacagttgctgtcttcaagaagctcatactttccaaggaaataaaggcatggaaacccacatagtgctgtggaattaaagaaggcagcatgctgtaaagagccccagctttttccctagacaacatcaggggctcagttcctttccctcctttctctcttctttaagaatttctcttagctggacatggtggcacatgcctgtggtcccagctactcaggacgctgtggtaggaggatcccttgagcccaggaggtcaaggctgcagtgagctgtaactgcacctctgcactgtccagcctgggcgacagagcaagaacctgtctcaaaaaataaaaaattaattaattaattaattttttttcctcctaactaattccacgttattggcttgagggtcagtttgaggggtccagacctccttcttcctttctatccttagcttcctgccacagtatacccagagatgtatgtgtttctccccaccctaggcacaattttttttttttttctgagacagctctgtcatccaagctggagtgcagtggtgcaatcatatctcactccagcttcaacctctcatgctcaggtgatcttcctgctgagtagctgggactacaggcatgcactaccatggcctggctaattgtttgtttttttttttgagatggagtctcactctgtcgtccaggctggagtgcagtggtgcgacctcggctcactgcaacgtccgcctcccgggttcacgccattctcctacctcagcctcccgagtagctgggactacaggcgcccgccacctctcccggctaattttttttgtatttttagtagagacggggtttcaccgtggtctcgatctcctgacctcgcgatccgcccacctcggcctcccaaagtgctgggattacaagcgtgagccactgcgcctggcaacctggccaaatgttaaacattttttttgtagaggtgaggtcacactatgttgcccacactggtatcaaactcctgagctcaagcgatcctcctgccttggcctcccaaagtgctaggattacaggtgtgagccactgtgcctggcccttttttaattttaattttttttttttttagagatggggtcttgctgtgttgcccaggctggctttgacctcctgagctcaagcaatcttccacctcagcctctggaatagctgggattacaggtgcgccctaccatgttcagctaacttattttgtttgttcagagacagggtcttgttatgttgcccaggcccaggcacagttctaatagaggagagagactttcagatatgagctcctgcacttggcaccaagatcttccctaattttcccccgacctgtctctccaacatgtctctctcttcttcgggttattttactccaatcattccgatctactctttgttaattgggcccttcattaaataatttagcctttcacaaaacacacattaagtgtgcatgacggcccaggcactgtattctctgtcagggttacacagatgaataaagagctgggatgggccaggcgcggtggcttatgcttgtaatcccagcactttgggaagccaaggctggtggatcacgaggtcgggagttcaagaccagcctggccaacatggtgaaaccccgtgtctactaaaaaaaaactacaaaaattagccaggtatggtggcgggtgcctgtaatcccagccatgtgggaggctgaggcaggagaattgctttaacccaggaggcggaggttgcagtgagccaagatcgtgccattgcactctagcctgggtgaaaagagcaagactccgtctcaaaaaaaaaaaaaaaaaaaaaaaagagctgggatgatgtagtggttaaaatcagtgttgttagcatagcacagacctaaattgaaatcccagttctgccatttgtcccctgtgtgaccttgcatgggtcactgtacctctctaggcctgtttctgtcttctgtgaaatgatcatgatagcattgttatgcaaattaaacgagagcttaagctgtagagcatttaccaacagtgccctatggcacatgcgcagtagaaagtagttgcaatagtgtgtagcaaatactttgcatcctaggttggattccccagaagcaggccctgagacaaagattcaagtaaaagagatttatttaaaactaatgagaagttgggcagggtggctcacgcctataatcccaacactttgagaggcggaggcaggagggtttcttgagctcaggagtttgagaccaggttgggcaatatagtaagacccaatctctacaaaaaaaattagccagacgtggtggcatgcgcctgtgatccagctacttgggaggcttaggtgggaggatcgcttaggtccaggcttcagtgagctgtgatcgtgccactgtactccagcctgggcaacagagtgagaactgtctcaaaaataaataggccaggcacagtggctcatgcctgtaatctcgacactttgggaggccaaggcgggcagatcacctgaggtcaggagtttgagaccagcctggccaacatggtgaaaccctgtttctactaaaaatacaaaaattagctgggcatagtggcgcatgcctgtaatcccagctactcaggaagcagaggcaggagaatcgcttgaactcaggaggcggagattgcagtgggctgagatcacaccactgcattccagtctgggcaacgagagggagactccgtctcaaaaattgaataaataaataaataaataaataaaagtaatgaggggactgggcatgatggctcacacctgtaatcccagtgctttgggaggccaaggcaggaagattgcttgagtccaggagttccagaccagcctgggcaacatggcaagacatcatttctgcaagaaattaaaaaattagcccagtgagtggagtgcatctatagtaccagctactcagaaggctgaggcaggaggaccacttgagcccaggaggttgagactgcaatgagttatgattgtgccactgcactttagcctgggtgacagagtgagaccctgtcttaaaaaaaaaaaaaagtaatgagggtggggaggagtggaaagggagtgggaaagtgggacccaagcacatgagtggaaccaagctaagtctcatggagggctggggtactgacaccttcatatttgtccaccgttggttaaggcctgggggcgggctgggggagtgggagggtggtggcatgtgaggatgtgggagagaaaaatttccaagtgcttccagctctctgcccctggaaaaggtcccggcagaggcataggcggggctgttgggagtgatttagcactctgggagtccgtaggcacaaaaatggtaaaggggttcaagaagaaatgcgtagaacacagtccctgcctcacaaggttcatggcctgggaagggaagacagacatgaataaatcattgccatagggtgactggggtgaagggcgttgggggtcgggtggggtgcgggaaggagtggtgtaggcagaggcatccctgaggagaaatgcagctggtttgggagaggacggccattccagacatagggaacagcacacacgaaggctgatgcacatacgcgcaagggctggtccctagagctggtggttctggccacgagagctcatcacctgggggcagcttctgtacctgcaccctgtatgaggctccgggtctgcccttcctggtccatcctccagacacactgcctgttcttctctcaggtcccgctccgggccctcctcccagaagcctcccctgactagtccagctcaccgtgactcttctgaactcacggcgtttactgccaaggctattacattggcgctcgctcatgtcattattaggaaatatgcatttttactgtctttgatgttatttaaacttgcctgtaaattctgtctctctcaattttaagttctgagtagaaactacatatttttattatttatattcttatattctcccatggcacccggcattcgtggacacattgaggaagtaagataatgaatgaatgaatgggtgaatccagtccagcttggggcctatttaattctactaggctcaacctacaattcttatgtgttctcagattattcctaaaccctaagcttagttttgtttcattcggaccacatgtagtttttttttgttttttgttttctgagacggggtcttgctctgtcgcccaggctgcagtgcagtggcacgatcttggctcaccgcaacctctgcctcccaggttcaatggattctcctgcctcagcctcctgagaagctgggattacaggcgcccgccaccatgcccagctaatttttttgtatttttagtagagacagggattcaccatgttggtgaggctggtctcgaactcctgacctcaggtaatccacccgcctcagcctcccaaagtgctaggattacaggtgtgagccaccacgcctgatctcatgtgtagttttttggttttttatttgtttgtttttttgagatggagtctcgctctgtcgcccaggctggagtgcagtggcacaatctcggctcactgcaagctccacctcccaggttcacgccattctcctgtctcagcctcccgagtagctgggactacaggcgccggccaccatgcccagctaattttttttgtattttttagtagagactgggtttcaccatgttagccaggatggtctcgatctcctgacctcgtgattcgcccgccttggcctcccgaagtgctgggattacaggcgtgagccaccgcgcccggcctctcatatgtagtttttaatgagagttaccacataagcaaactgggttctaagtggtgaaatttaaggttatgcaacctcagtttcttttaacccctcttcatccctaaccctggtcggatacttgattgacagtagaccattgggatctctgagctcctgtccttctaacctgattgcctctttaaaggattttgaaaaactatgtcccttgcacatttgtattgttttgagacacggtctcactctgttgcccagactggagtgcagtggtgccatcttggctcactacagcctcaacctcccagggtcaagcaatcttcccacctcagcctcctgagtagctgggactacaggtgcgggccaccacatctggctaatttcttaaattttctgtagagacagttttgccatgttgcctaggctggtctcaaactcctggccacaagcaatccacccgattcggcctcccgaagtgctggtattacaggcatgagccacctcgcccagccccttgcacatttttaagtcaacatttaacatttgtaataatttaatagcattccaaagggtaggcttttcagggaattgcaaatacatgttaaaaatcacatcactatttatgtatttatttatttatttattatttttgagatggagtctcactctgtctcccaggctggagtgcagtggtgcgatctcggctcactgcaacctctgcctcccaggttcaagcaatcctcatgccctagcttcccgagtagctgggatgcccagctaagttttttgtatttttagtagagacagagtttcaccattgtccaggctggtcttgaattgctgacctcaagtgatctgcctacctcagcctcccaaatgctgggattacagtcgtgagccaccatgcctggccatgtcagtttttaaaattaaaaacaatttgttgtgctcagtctgtcggagactgcacgtcactctaagtgtagcaaattgaatataatgccatagaactttcatatctgttagcatccttttaaaaaatacgtgaacaagcccttgaacaagtgttagaaacagttattctatttgtattgcaattattgcagttaaccaaaactaggaatattcacaaggattaaacataaaaagttggtcaggcgcggtggctcgtgcctgtaatctcagcactttgggaggccaagatgggccgatcacttgagctctggagtttgagacaagcccgggcaacacggtaaaaccccatctctaaaaacgaaacaaaactaaactaaacaaatacaaaaaattagtcaggggtggtgcacctgtagtctcagctacgccagaggctgagataggaggattgcttgagcccaggaggttgaagctatacgagccatgatcgtgccactgcactccagcctggatgacagatggagaccctgtctcaaacaaacacacaaaaagacatgaaaagtaacttattgaaaatgcatctcttggccaggcgtggtggtttacacctgtaatcctagcactttgggaggccaaggcaagcagatcccatgagatcaggaattcgagaccagcctggccaacatggcaaaatcccatctctactaaaaatagaaaacttatctgggtgtggtggcacacacctgtaatcccagctactcgggaggttgaggcaggagaatcacttgaatccaggaggcgaagcttgcagtgagctgatatctgtcgtgccactgcactccagcctgggcgacagagagataatacgtctcaaaaaaaaaaaaaaaagaaaagaaagaaaatgaatctcttaatgagatgggaaaggttgatttgtttcctattgacctttggcggctctgggaagggcactctggtcaggcccaggacaagcaggagattcattctagcggggggcacatattaatctggaaactgattcccttaaaactggtcctgccgacacacccctgggaaggtttgcatataccactaggggtatccaagccataggccattaaacagagatgaaacttgccttcccattctttaatatagtgttctcagaaagggagaaatgtgggcctgaatgttattgtgacttgcatagtgacatttccaaccctcctcctgctaagccccagagccttacatgctggacatgggcaagataggaactcaagttacttccaggtctccgtaagtttaggactgtgaagagggcatcctaatagtcaaaaacataagtgttggccgggcacggtggctcacgcctgtaatcccagccctttgggaggccgaggcggggagatcacgatgtcaggagttcgagaccagcctggccaacatggtgaaaccccatctctactaaaatacaaaaattagccgggcatggtggtgcgcacctgtaatcccagctactcagaaggctgaggcaggagaatggcttgaacccgggagccggaggttgcagtgagccgagatcgtgccattgcactccagcctgggcatagagtgagactccatctaaaaaaaaaagaaagaaaaagaagaaagaagccgggcgctgtggctcacgcgtgtaatcccagcactttgggaggcccaggcgggcagatcacgaggtcaggagatcgagaccactctggctaacacggtgaaaccccgcctctactaaaaaatacaaaaaattagcctggcgtggtggcgggcgcctgtagtcccagctactcgggaggctgaggcagaatagcgtgaacccgggaggcggagcttgcagtgagccgagatcgtgccactgtactccagcctgggcgacagagcgagacttcgtctcaaaaaaagaaaaaaacaaataaataaaaataaatgaaaaagaccctaagtgttagttaaagcagcagcctagattcagagttaagaaaacatgatttttatttttccgtttcatggaagcagcagctgtctactgatagttcctgccgccggccaccaggtggcagaagggaacacagtaccgtagccctgccccagcgatcgcgcgggcaggaagaccgggtgggaggtaggtggggccgaggcctggaggcgaggtaggagagtaggcttaggctgtcagaggaaaaaacgggcgatgtgaggactaagtatggatctcaggaggggacaggaaatattgagaacaccaccttacgggttcagaataaaaccgagggaatgaggaagaggtttaaggagataggctaaattgggaagaattcacggggaatcagagggtggagagggcgtgggtgcctggagatgcctgggaacagaacggctgaggggactccattatctgtactcttcccggggtgggtctaggtctggctcctcctgaggtcggttgtccacctcaggggcaggaggccaggggttttctgggggctggggtcctgccggccaagggtcgtcaggccggggaggttgaggaggatccgttctaggcggttcagggggccagactccagtttcaggcaggtctctccagggacgactggggcgggtaggcggaggatcttcaaagagagggggtgcccctggccaagggtcaccggggactggggggccctgaggcaatgttggggagcctgcctcctctcggtcctctgcgggtgggtgagaggggtggccctcgctgcctgagatgcctgtaaaggaggaaggagaaaggtaagaggtggtgagggcttctctccccagccccacccagccccagccccaggaggaggagcctgtctggacggacgcagcctgaactgacccacaaacagaccaaaaaagtcactctcaaagagctctcggtaggtttgtaaatacttaactgatggtaaaatgtcatgaacccctacccccgatggatctgaaccgttcacttgacccactttaaactgaccagacttctccaaataagctccatccacccctggttggggtaccccactagctttgtcctcaggccaacctgcaacccaaggtgggttacaccttggcccccaggcacacagaccccagctttacaaggaccccagctccttaacacagatcccagctccaaggaaactcgtcccccccacgttaatcctgaccgactttgccacatggagccagcaaaccatttctggtgagagccaaatgcaccttctgcaccatgtcccccacccaatgtgtccagaaagccatttctggtgagccagatgcaccttctgcgtcccctgaattcctgtccccaaccccatgcgtccagttcacctccgccatcttgagtatccctcatcaccccaaactgcagtccctgcctctgttcccacctcacctctggtgtgcaggcaaaggaccaggatccccaggagcttccagttgaggatcatggctatgtactggcccccaaagctggggtgggctgagtctgggtgcctgggaaccccaagaggctttataggggaggagtggaggagggaccagcccagtggcacaggaataccatcagaacagaactggtcaaacccgttgggaaggcctgggctgatgtgtcacccctgaaggtggcgtcccttattttagtcctccagcccaggacccagctgcctgctctccctatcatgacccagagcctgcgtcaccccaccctggttttcacaccctccatccacaccctggagcagtcaatacccacttggcatctccgtaatcacagagatgtccaccttcatcccttgcaactattggaagccaaagaatgggagcaaaccacacgatgggcgttgggaagcaccgtaattacagggttgggaggcaggatgcctgcgctgggggaggaggtgcctttcaaacctgggatgcagctgggacagtgtcagctactaccccagcctccccactcacccccgcactgaaagctccccctggggcttcgtgctttcctgggcacttcccttcccccatgggatccaggcatcctgctctccaccatgtccttcttcaggcatgcaggggacctccaagcaatgatatccaaggaattccatctggcagccacccaggatgactgcagaaaaggaaggacacaggaggatatcctggttccctcttcccacccagagctgtttgcatcagtcctgccaatggctccggaagaagctgccaggctccagcaacctcagccccttcctcctccctcaggaatccacctatccgcctctaggaccttggctccaactctattgtactcgtctcctccctcccattctccttttggtctcagctccttgatctaagcctcccagagagacccctagaatgtttccctcaaggacctttctgcctggaagtctgttagcctttcagaagtaacatgtccaaaataaaatttgattcctcccaggttgttccctgcctggtccgctaccccacagtaaggaacaccttattatgcaatggcgtgatctcatctgttccctccagggctcacgcagaaaccttcgttacactcctccaccatccacctgcaagcccctccacaccctgtccaaacccagcccatcatcctgagccaccatctcccctgagcctccccaacacccttctaattggcccccttgctcccactgtttatccctccccctcacacaaagcctgtcctccaccagcaaaagaggtcttaaaatatacatcacgcgggcctggtgtggtggctcgcgcctgtaatcccagcactttgggaggccgaagcgggcagatcacctgaggtcgggagttcaagaccagcctgaccaacatggagaaaccccgtctctactaaaaatacaaaaatattagccggacatggtggcacatgcctgtaatcccagctactcaagaggctgaggcaggagaatcgcttgaacccaggaggcagaggttgtggtgagctgagatcacaccattgcactccagcctgggcaacgagtgaaattccgtctcaaaaaaaaaaaaaacatatatatatatatcaggccaggcgtagtggctcatgccagcactttgggaagctgacacaggaggaccacttgagctcaggagttgtgtgcgctgcttcacctgcagcaagactgtgggcaacacgtgggaggcctacctggggctgctgcagtccaagtacgctgatggggacgccctgggcctgaagcaccacagccgctgcctgccgcatgctgctggcccacgtggacctgatgcggaaactgctcaattatgccctcctggggaagtgacctggttagacccacccatctgctgcgctgggtgccgggagcaatcgctgaccacagtgcgtggatatgtgtacctcactctggaagggaccatccagtaagtccctcaggaaaaaaaatgtacaccaaatcatgttgcgtcttccctttgtttggggagtgaggacaggttctcgctctcttaggctggggtgcagtggtgcgatcacagctcattgcagcctcaacctcttgggctcaaacaatcctcccaactcagcctctggagtaactaggaccatgggtgcacgccaccatgccctccaatgttttttatttttattttttatatagatggagtctccctatgttggctggtctcaaactcctgggctcaagcgatccgctcacctcggcctcccaaaaaagtgctgggattcagctactccggaggctgaggcaggagaattgcttgaacctgggaggtggaggttgcagtgagctgagattgtgccactgcactccagcctggcaacaagagcaaaactgtctcaaaaaaaaaaagtgctgggattacaggcgggagccacaacaccgggcccccttccctgttttttttttttttttttaattcttcttctttttttgaggctgagtctcgctctgtcacccaggctggagtgcagtggcatgatcacggctcactgcaacctccacctcccgtgtccaagcaattctcctgtgtcagcctcctgagtagctgggactacaggctcacaccaccacacctggctaattttttgtattttagtagagacgaagtttcaccatgttgcccaggctggtctcaaactcctgagctcaggtgatccgcgtgcctcagcctcccaaagtgtcaggattacaggcgtgagccaccacacctggctttcttccccgtttttaaagaagtactccaatggctttctattgacttacagtaaaatccaaacttggccacatctcggcctcgcagcagcatccttgagcattctctacagagacctcctggcctccacaggagcccacttcaggcaggcctctgcacaaggtcccctgctcagaggcctctccccagagtcagtttctatcatatcatcgtactgtactttctcttcaagcacttatttgaaacgatctcgttcatctgtttaggtcccatctgctcgctcgctctcccactaggatgtaggctctcagggtccaagtggcccccaggctaatacagtgcctggctctgacattcctgttgaacgagtgaatgtttcatcttccccactcctagcatttatcatcttccagaagaaaagagttttaaaacaaaagttgagaataaagaaaagcaggagcttcccaaacatttccaaagctgcctagaaaaaggatttgaaaaggtgccacccatagagagagctatgggtgggaccacttctcacaatctccaagagagatggctgcagggagaattcccacagattcccagaaataacatttccaaacaatggctccttctgtagtcgtctttatttagagcagaattcagactcagctggtatcccccagggcaaccccaggatggggaagggctggtctgtccccacccacttctccaggatcctcccagcccccaggctggctttccctccaactgtcagctgcttagctgctcatctggggattggagctggagcatctgtcaaggttgtctccttgacaaacagcttcctctttggaaatggcttcactcaggtcctgcaggtcatcgagcaggacagagagggaccctgggaaggaagacagcagatgagcaccagacaagggaaggtgctcgtggttacagaggaaacagggctggcacaggaaatgaggaatgggagagaggaggctctttggtccaagctgggcatcgctaaaagaggctaagggcctcgaaggaccgcagagaacaacactcatcatgccagagtctgaagaggagattcctgaagtgcgcgcatttgtcccttgtccctttgtgcttggcccaagaccttttatggactccctggtgggcactgctgctgctacaggtgcagatgctgaacactctggaggcctggggctggacaccacagatttcttcttatccagtagggaaggaagaactgtcaacagtcgctgctgcttgtaacgggagaggagaccttcctgctgcaaggtggcctgggaaggagagggttaaacctagcccggatagagcctccctcaccatcctctttccacacctctagcccaggaaccagcccaggatgggccctagtgtctgcctgtctgccctcctgtctcctaccagcatgaggttcttatccctctctagctcctgcaagcgccgggccagtcgctgcccctcctccttccgggcctcctcctgcagacgcctgagttcctggctccgctccttttcctgggcggctctgcgctgaatctggcgcaaggagaccactacagagaggccaaggcacagaggaggcaggtgtgagtcaggccagaggcagccaggcaccatgaagacaggaacaaacgctgggtcaccaactctgtggcttggggaggctgttctgctctgtggatctgtctcttctgtacagttggaggggtgggctgatgctctaggagcctgggaatctgaacctaagtatcttcctcatccctgaaccatcctggagttcctcaggggaaatctgaacatgaactgggttagattttgtgcaattagtgttcactgtcttaaagtgtgatgattgcagctatataggagaatttactggctttgggagatgcggctgaacaacttatgtttacaacttacttaggcgtggtggctcacgcctataatcccagcactttgggatgccaaagcgggcggatcacgaggtcaggagctcgagaccatcctggccaacatggtgtaatcccgtctctactgcaaatacaaaaactagctgggcatggtggtgggcgcctgtaatcccagctacttgggaggctgagccaggagaatggcttgaacccgggaggcagaggtcacagtgagccaagatcatgccactgcactccagctggtgacagaggaagactctgtctcaaacaacaacaacaacaaaacattaaatgattacaacttaaagtgattcaaaagatgtacaaatatgtgtgtatatagataagagaccaaatgtggcaaatgttaactgctatatttagttagagaagatacattcattacacaattctttttttgacacatggtctttctctatcacccaggcttgagtgcagtggcacaatcttggctcactgcagcctcgacctcccgggttcatgtagtcttcccacatcagcctcacaagtaagcttggggtacaggtgcccaccaccaggcctagctaatttttgtatttttagtcgagacagggtttcgccatgttgtccaggctggcctcaaactcctgacctcaggtgatacacccacctcggcctcccaaagtgcttggattacaggcataagccaccgcgaccggccatatgctgtttcttaatctggtgctggctacatgggtgtgttcacgatgtgataattcatctgtgctactcctggataccttcattacttcctgtaatgaagctttgaacacactttgaggggaaaataataaccttatgtcttaacacttccttcttcctggaaggccctatccaccctggcaaggctcaccggccttggcatgctccctccgagcctcgttcagcctcctctctgtgtctgagagttgctcccgcagccgagtttccacttcagccaccttttcttgcagggctggggtgaaagtgcagacggggcatatcagcaggagctttgattcgcagttcccaccccaccctccaagggaagcacccatttccctctcgacaccttgcccgtagagttcctgctgctgggtcagctcctgccgcagactggcagcctcctctgtgctctcctgctggccctggcgtgctacctccagctgcagccccaagctagccagggactcctgggtctgctgcagctcctgctccagctgctgggccaccttgctcagctgctgccgctctgcctcccctaaaaggagggggtgctgggtcaggcctctcccagcaccctagacactgggtttttcctcatcctctccaccctctggcaaccaggtgtaccttgctcccgagcccggcccacctcctgctggatgaggcgggcactcagctgcagttctgcatccaggcggttccgttcttcccgcagctgctgcaactcaaggctcacatctgtgaccggtggtggtaggggacagctgggacggggaagagaaagagtcaggagaaataacccagctgcctgatcccaaagcccccatcccacctcagtcctcatggttttgggggtcccagcagccaatgccctaaagccccatccacctcaaagtgcacaaacttcacctctcctggcgcagctgagcaagggcaagctttcgagcaatcaggcctggaggggaaaaagcagggagaaaaagagatgaagtttgcatgggagaaagtggggacagggagtaagggaaaaagagatgcaaggactggtgaaaggaggaaggtgaatggatgtgggatcagagagagctgggtcaggaagaagaaagtccgagctggtggggtgggggcaggacgtggctcgcagttgtcctacgcaccccgaatggtgtggaccttgcggacagcatagctgagtcggttgttgaggctgggaagctgggcggcagccccttccaccttagccatggtggtctcgagccagatctgagagctggagagggcacaagtcactgatcctccatgcctcccctcattcccaaaggacttgctgtgccttgtatagacaactccctctaatcctgtcccattatacaagtacagaacgcacagcttccgtcaattatctaaaggacccttgccccaagaatgcattaaatgactatctttttaagcaacctgttaagcttatttctcacaactgtgttttgctcactatcgtgtatcaaagagtaaagttatcctctctggtcaggggcagtggctcctgcctgtaatcccagcactttgggaggccgaggcgggcggatcacctgaagtcaggaattggagactagcctggccaacatggtgaaactctctctacttaaaaacacaaaaattagccgggcatggtggctcatgcctgtaatcccagctactccagaggctgaggcacgagaatcacttgaacctaggaggtggaggttccagtgagccaagatcgcacccctgccctcaagactgggtgacagagcgagactccatctcaaaaaaacaaaagaaaacaaagttatcctctccaagcccaggagtgtcgatctagcaccaatgacgggcaggtccacatgctttaccagctggctgtgccagaagtaggaccaacctggctcatgaaaactgagcagcttaaacaggccccaggaggaggccaaggagtgtctggggccgggctggggtttcctcaggagagtccaggtctgcacccacagaaaaacacatgatgatgaaggcttgcagctgcatccccagcagcacagcaaagttcactttgatctggaaattgttccagtagatgcttccaacacctaccacagctcttattaaagtctccaattacctagagacaatctaataaacccagcaacaatcagagtttggactgctttaagcctggaggactttcggcaaatgcatcattacacagaccatttctgtgatcacctggtaccaaagtcaaaccctgtccacagtgcatctttctgttctcctggaggtagggggcacccgcgatggattgaacctgggtggtaggtcattataactagtttaattccgtgcaagtttgaaatttttcataatttttaaagctaaattagtccctaaggtacaaacccaagagaaggaagtggtgggcaaggactcatcctgcatcttaatttcgctaaaccaaaaattatctttatctaaattaacccatcaagaagagcctcacgataacaataaacatttacaagccagagactgtgctaagaactacctgccggccgggcacggtggctcaagcctgtaatcccagcactttgggaggccgaggcgggcggatcacgaggtcagaagtttgagaccagcctggccaacacagtgaaaccctgtctctactaaaaatacaaaaaagtagccgggtgtggtggtgtgcacctgtaatcccagctactcaggaggctgaggcaggaaaatcgtgtgaacccgggaggcagaggttgcagtgagctgagatcgtgccattgcactccagcctgggtgacagtgcgagactctgtctcaaaaaaaaaaaaaaagaactacttgccttgggtacctcagtgtctaaggctgaggggaagtcatcaccagcacaaagaagctttgctgttttcttagaggtttttctgaaggtcatacaacaattgtaggtaatgaaacaactaggaagttggtaggagagacaaaggctggcaattgatttagaaggaaactaactggcttacattttagatggaatagtaagcaagttaagtatataataagcaagtaagtatacagctttaaataaatagactaggccaggtgcagtggctcacacctataattccagcactttgggaggctgaggtgggtggatcacctgaggtcaggagttcaagaccagcctggccaacatggtgaaaccccgtccctactaaaaatgcaaaaattagccgggcgtagtggaggacactggtggaggatgcctgtaatccagctactcgggaggctgaggcaggagaatcacttgaaccagggaggtgaggttgcagtgagccaagattgtgccattgcactccagcctgggtgacagagcgagactttgtctcaaaataaataaataaatagactaaatttttctccagtgaaacggattgcccgtaaaattttagaaaaaaaaaggaagatgaagtgtctacactctccatccttgaacaatactgcaagtgaagatcctcccgggtgctctatttagctcaagccattactagactgaactgcaggaggaagcaaggcctcacctccagccaaacatgcaacgggaaattcataacaagcaatcaggtatgaatgcagaaggggcttccccaggaaaagaaacgaacacaggaacattgatagagctaaatctgcccagccctgtagcctccagtggccactttccagcccctcttgcctgaggatcctcagcaacaaggtgcccaggaacctgaggtggcagaaacactactccacccacccctccatccctgatacctgctgacagcattgaccacaagcctcagctgctcctcggctgaggctgtctgctgctgccaccgacgcctggcctcctgagcacggctcagctccaactgcaggccctggggaggatgcagcaaaggacagggtccctccctaagtcctggctgcagccccggaacaggggctcccttgccctccccgagtctctagtaggctgacaccaaccttggcacccatacgctccacctccacctctgcggctttgtcctgcagggatcgctgcaggatggcctgctcctggctctgggatgtcactttttcctggagtgaggccacctgggggaggagagagagctgggcagggccctctagagctaaaagatgaggggggcactggaagcaaagtggcaggtgcagagatctctgtaagaatgccatgcaggggctggggggagggagggcgggcgacgggggtgggtcgcagcacggtggctcacacctgtaatcccagcactttgggaggccgaggcagatggatcacttgaggtcaggggttcaagatcagcctggccaacatggtgaaagcctgtctctactaaaaatacaaaaattagctgagcgtgatggcatgtgcctgtaatcccagctactcgggaggctgaggcaggagaatcacttgaacctgggaggcggaggttgcagtgagctgagatcaggccactgcactccagcctgggtgacaagaacaagactccttctcaaaaaaaaaaaaaaaaagaaaagaaaagaaaaagaatgaatgccacgcagggagacagaagcttaggttctgaggatggaatctgagcccagtgttccatgttccacattccatgtgcccactcgaagatgggaatagcccttgacacaccccacaagacccaccaactgaccatgccactctcctcagatgctgtcacctcctcagagaggctgtctctgagcatcctacctgaggctgactcaccccacagtctctccgtcacattatcttttgaatttttcttactactttctttttttttgagaaaagatctcgctttgtcacccaggctagagtgcagtgatgggatcacagttcactgtggcctcgcctcgacctcccagcctcaggtgatcctcccacctcatcctccagagtagctgggactacaggaatgagccactatgcccggctaattttttgtatttttagtagagacgggatttcacatgttgcccaggctggtctcgaactcctgacctccagtgatccacctgcctcggtctcccaaactgttggcattacttgactgggcacggtggctcacacctgtaatcccatcactttgggaggctgaggcaggtgaatcacctgaggtcaggagttggagaccaaagtgatcgcattataggtgtgagccactgcacccggcttcaatctttctatcgcacatataattacccaacattatctgtttacttgcgtgttctgtgtctctgttctagaatgcaagctccacattttagttttgttcagggctgtgtgcccagcatgtggcaaccactcaataaacactggttgaatggatgccaccttcatggaaggagcaaggtgctgggagggaataccgggagaaaagagagtgcagtgacctgtcccttcagctgcttaacagagtcactgtgttccagctcctgggcctttagctgcaccatgagggcaaacaccttctcccgccagcggttcagcagggactggcacttcctggtaaactcaggctccagggaatctgaaggttgaacctgagggagaaggagtgggagaaaagtgtgggctcctgggggaggagaggaaggaggtggcatctttgtttctcctctgtcctgcctgggcaacatgagctacagcaagaggagttcacaggaaggagatctaagcaggttctggggcacattgacccctcctgcccacagggagggaggcaggggacagtagatgcaggatgcggctgagggtgaggggtctgggggttgggctgtaccttcctggtcagctcctcctcctgcagggcgaggatgtgtgtgaggctctgcacccgcacctgcagcagctccgcggtggcatgcaggctgtcccggtcctcctgcaagtgctgcgggcagaggaaagcagcccctctgtagggcctccatgccgccttaggtaccaccttctctcccggaggctgtgctctacacgctcctccaagggccacgcttgcctcccaacctgatccctaagtctgcacacagatacattcctgcaccctcacctgcatggtgtccagaagcttctgtcgctccagttcccatgtctggctgtggacctcagaagggacttgttccccaacatattttcttagattctcaaccagggtcacctgagcctccaagtcttcctgggtcttgctagggttggggtgggaatgggacagccatcagtggggcgccctgcagatccaccacatcactaattgctgggctcccgtcggcgtccgcccacctacctcagctgcttccgaagcagctcggcctccctctgagcctcggccagctccttggcttcccctgctcttctggtttccagactactcagagacttctccaagccctcagccttgctggtcaaactggaaagagcctcctcgtgagcctgtgtcaaagaggacagctgcggaaagaagagggggctcagcagaggctcgaccccacatggaggccttccttgttcccttcactcccactttctgtgaccttagagaatgacccaaccaatcagccaactgtgcacagcaaatggagagctggcaactcactctccgcagctgccccacaacccatcaggagttcttgtccgatctcccccaaaacatatcttcacctctctgtctccgtctccactgccaccaaccctcatcttttgcctgggcaacagcgaccatctcctaactagtctttacaaaccctcagtggcttctcacagcattcacaacaaaacccaggtgtctctccacacctgcaggccaggggacccggcctctgcctacctcctgagctcaccctggaggctctcccactgctccccgctccggccacggggagtctgctgagaaccagacagcggcccctccttgctccacagaccccaggcgatagcccctcctcagggtggcttcactgggccctctaatactgtccctccccaccctactctgccccatcagctgttcacgtcctcctgagcacttagcactgaccatatcttgcttatgtgtatgtgttactatctgtcggaccacactggaaggaaagctccaggaaaggaggaattttgtgtcttttgctcatggcacctcaaagtgttgcaggggtgtcagagccaccaagagtcatgggatggactggaaaggagggcaaagtgcccaccctgcttcctggtctgcctcctctagccctgtctccatacaacaataaaattaatttgggggacataaatgacaaaattttttagacataaaatacaaatctaatcatgttatttccctgcttaaaacctttcaacaggccgggcgcagtggctcattcctgtaattccagcactttgggaggccgaggtgggtggatcacaaggtcaggagattgagatcatcctggctaacacggtgaaaccccgtctctattaaaatacaaaaaattagctgggcgtggtggcgggcgcctgtagtcccagctactcggaagaatgacatgaacccgggaggcggagcttgcagtgagccaagatcgcgccactgcactccagcctgggcgacagagcgagactccatctcaaaaaaaaaaaaaaacaacctttcaacggttgcttattacttgaaaaaacaatttttttttgtttgtttttttggagatggagtttcactttgttgcctagactggagtgcaatggcacgatctcagctcactgcaaacgctgcctcccaggttcaagcgattctcctgcctcaccctcccgcctcaccctcccgagtagctgagattacaggcatgagccaccacgcccagctaatttttgtatttttagtagagatgaggttttaccatgttggccaggctggtctcgaactcctgacctcaagtgatccacccgcctcagcttcccaaagtgctaggattacacatgtgagcaaccatgcccagccctaatttcttccataaaatagagatgggggtctcgctttgttgcccaggctggtctcaaactcctgggctcaaatgatccttccaccttggcctcccaaagtgctaggattacaggtatgagccactgtgcccagcctgctcattgctcttatgggaaagtagcaagttctgaagtggccaaagccttgtgccctgggtcctgggctctgcagcacactcagtgcccctcatctctgtgccccagccttctggcctcctgtccccgccttcacctgttgtcccaccaagtgtcttccagctaccactggacttcacacgcctcttcactggccaactcctattcagcacaaacggtagcttgttgtttttttagtctcgctctgctgcccaggctggagtgtgatgtcagctcactgtaacctctgtctcccaggttcaagcaattctcctgcctcagcctcccaagaagctgggggattacaggcgcccacgactatacccggctaatttttgtatttttttgtagagttcttcatgttggccaggttggtctttaactcctggcctcaagtgatccgcccacctcggcctcccaaagtgctgggattacaggcatgagccactgtgcctggcctagcttcttgtttctaagtttctttcataaatctcctttgtccattttctgattggattgctggtctttcccttaccaatttctaggcacacattttatattagggatattacccttttcttgtgatctgagctataaatatagcttttttttttctttttggctattcctaatgttcatgttataaagtcaatggatcaattttttcctttatggcttctagattttggattttgactcacaggtagaaaggccttgcccactacaaggttataaaggaattctcccttgttttctcccagttccttttttattttattttttgagacagagtcttgctctgtcgcccaggctggagtgcaatggcacagtctcggctcactgcaacctccactgcccaggttcaagtgattctcctgcctcggcctcccaagtagctgggattacaggtgcgcaccaccatgcctggtgaatttttttatttttagtagagacagggtttcgccatgttggccaggctggtcttgaactcctgaccttgtgatctgcctgcttcggcctcccaaaatgctgggattacaggcgtgagccactgcgcccagggctatggtttctttccttgacatgtcaactggttacagtggccttccctgaaccccagactaagttagtgctttctagtccttctccttcaaggcattcctcctgattgcaattaattatgattaaattaaatgtggatgtgtatatcccccacgaggctgtcagttccatccacgaaggcaggactcaggctaatttggtcactgagtcttagagatggcagagtaagtactgagtttgaggactgaataatctctctctcccagtccaccatagcccccttatacccaccttcctcactgccctccacaatacccctgatgaattggtacctggagtaaagtagggaggcaaactatttcctactagaaagggaagcagggcttcaagtggtgggaggccacctgagtcttgggggaaaagtgcaacctgaattaagataaaagtacccaaattctccatctttctagcccatgtgtgtttattttcaccaaaggtctcatcactctactactcactactcatggagggtcttttctgcaatacctgttctttgcttggaagctactgcccagctctccgttatgaatttgaatcctttctacccctgcattcacctgctcttggtgcagcctctgaacctcttccagctcccgctgcctcccctcttccaagttcttccggacaacctcagccccagccaaagcagcacgcaggccctcagcctcagctcggccggccttctccgcccgtgccagagcctctagctccatggcctgggcctctagcctcatcttctgctgcagcgaggtctcccgcaggagccggacctcctcctccagccgccgcagctcttgcagctgccgaacgatcacctcagcctgctggctcagggcctgtgacccctccagcccccaggaccttcaaagacaggttagtgcaggtgagacttgtctccagtgctggaaggatagttgagggcataaacatagccaggagaaggaaaagaggacccctctgcttccgtgtggggaggtgaagggggtgctgaagctggggtatggggatgtctgcattgacatcatcatcattcatcaaagccctattgagcatgttgagtccagtgcctggactcacaggacctaaagtctggctgagatcgtggaacatgatctccctagagagagctacatacaggaggattcaacatcaaatgtgtatatcattaggccacacattctttttgttttttggtggtttttttgtcttatttatttttttatttttaggccacacattttaagtggaaaggttggaagaacacacagggacttctcaattctaatttaagggcaagaagtttgagggaggaatgggcatagagaggtcgtaagcttccagtatcaatatggtgaggccaggtgctagttaaaaggcatttattggctgggcgcggtggctcatgcctgtaatcccagcactttgggaggccgaggcgggcggatcacgaggtcaggagatcgagatcatcctggttaacacggtgaaaccccatctctactaaaaatataaaaaactagctgggcgtggtggcaggtgcctgtagtcccagctgcttgggaggctgaggcaggagaatggcgtcaacctgggaggcggagcttgcagtgagccaagatctccccagtgcactccagcctgggcgacagagtgagactccatctcaaaaaaaaaaaaaaaaaaaaaaggcatttattgagtgttaggtatactttatgaggagtctgagagaacagtacataaataacacagtgccagcctttagagaaatcgtctaccaatgtcacgtgaagtttaatccagcttggaacatggctcctgaggcagctctctgagacccaggactataagagattgttgttgttgtcgtttttagagacagggtatcactgtgtcacccaggcctcaatgcagtggctggatcataggtcactgcagtcttcaacttctgagctcaaggggtcctaccaccttagcctcctgagtagctaggactacaaatgcatgccaccacagccagctaattattttctgtggagacggagtctcgctttgttgcccacgctggtcatgaactcctgggctcaagtgatcctcctgcctcagctcccaaagtgctaggattataggtgtgagccgccatatctggctcgctctttctttcttttctttagtagcagcgatctgtaggctagggaaattaagtgacttgccaaatgtcctctagctggtagccaaactagaaatagagtctctgtctcctgacacccagtctagtattccttcttcatcatgctgcttcttctaatgtaatcctattctggagcaaaatggcagaatgatatcccagtacatctgggaaaagacacatgaaacaagaataagaatgtttacagataatacgacagcatggccagctcccacagcatgtcctctgtaaaggctttcttccatcagaatgaacccacactgccacagtgctgggtctctacctctagtttgcacttcttcatcttgcctcataccatgctttaccatcagctggtggtcaatctatctcccctcttaggattttagattccttattaattacaaatttaagtcaggatttgtcttattcactattgttatcctcatccctagcacttagcacactgctttattatttatgcactgtaggaactaattgcttacataaaaatgagtacgttctggaaactagggccgaaatagggtaaggagtttattccagtgaggaagggtcactagcaagcaagcctgagaaaacggcgtggatggatccctacctgcctctccgccctggctcctgcctgtcactggaaacatcccgttcccacatggtcacttgaggtctctgggtgtctagccgcctctctgagacatcttgatggcctgggggttggaccaggggaatgtctgagagccaggtgggagccattcttggcagagttgaaaggggccgagcttgaaagtgggaggggggaatcagcccagtggaacctgaagaattacaaaaacaaagatggtcagtttcccaggcagagacaaccaccactccccttgtctggtcccactgacctgaaggtggaaacatctccacattatttgaaggctctagattctgtcttcagccatctatgttcccctggacaagaggagaaacaaagacactccaattcaattttcaggccaccttccaaagagaaagcccctacaataacaaagtcataatccttgaattatagccaggtccacccgatgcttagctcttttcctacttccccaaagtaggagataccccaaattcacttgcttgtctcaacctggttcctcatggaacccaagcaactaactatcaagtggagagaatttactgaaagagacagactgagaggggctctgaggctttactcatactttcaggattctgggcagtgcctttaccctcctccttaagtttctatggtccctgctgctcctggccagaggtgagaaaggaggtacacagtgcaggggtcttgagcgccatctccagagttctctccatggctcagcaaggcctgagggaagcccatccagacaccagcaggccatgactcttgggtccttccctgttaaagtgctggcccaaggcctggccccagctgaatgtggccacatgcagggctagaccctccccaagaccttgggaatccaggccgcctagatccccaggcagaaaagccagcgtcctgacatcttattcaaatctttcctgcggctgttctctcagcttctctctactatccccttagcttccatgcctgctgcccgcctcctctttctcgagtcctaacacatagtgggcacttgaagatcttcctcccaccctcccaccctcattaatctattttttacccgaatctgggatccctactcccgtccctttttacaacctaatctacctttttctgaaggaattattctggtcctgaccctcacccccatctctcaatagcctgccctcgccccctgtacgctagccggctctactctcccaccactgctcccctagatacccgaggcttcacccagttagcccgtgagctctaaggctgttctgatctcttcatctgtcccttcacctggcccctgtacccccttcccctttggaccccttgaaccctcccaggacccccgctcagccccttcccgcccccaaccgactcttcccgaacgtcccttaccaaccgcgagagccccctactgcgctttggccacaccccctacgcctcgctcccggccccgcctctgcccctgaccgcgcctgcgcaaggcgggcgccctaaagtcctatttcactctgttgggaggagggggaaaggtgtacgcaggcgcagtggcgtctaaatttgggcccactaaatgcgtcggagcatctccgcgcccaggcggctcctcctcactgcggcaacccgggaaaacttgtgaactaatcagaaaaagtggaaggcgggagatcttggggcgctgtccaatggcgcggaagagaacaaatgagctggccaatcgggaacggcacgggggcgggctcgctcggcgcgaagttcgggcccgggaattccgaaggaggggtaggcgctgcccgcgcgcagaggccgcgcccctcctggccccggcttcttggctgtcaaacagatgcagcaacgtcggctcctgccgaggagcccaaggggtcccgggatccgccgcacaggctggcactgcttgaagaggaggctactcggagactgcgccgcgcgggtagatccgaaacggggctggggcggagtgggaaaaggccgggtatgccttgcatgatcgcggggagctccttcctgtttttatcccacctagagaagccgggaagtaggggtttaggtccaatttgttggagtacttaaggactcgtttgcactttcttttgggggatgacagtggattcattgccctcggaggttcaaccagttatgagtgagggattggccagaagatcggggcgcaggcaagcaggagtgctctattaggataagcaagtttgacaggaagaagctgctcttctccgaattacacagaggtgatgtgttcgtattgcacgtagacgtgtgtataacaggacctccttccccgcgccccgccaccccgacacacacaggagctgcctaaagtatccttgccttgcagattggaggctccccaaatattttgtgatctgaggatccagctcaagtgaggtgccataggacgtgttcctgagtttgcattgcacggagaccttcctggaatttttcatttgcaagtcggcttaaccaattttgcattgagtcctaggctgcttgcactctgaatttgggctattcaggtagtgtgctcaaagttgaaaccgcatacagcacaactcaagtttgcatcagactgggaagcgaacttaagccagcggtgcgtggcccaggagtgggaaaggaaatggatgcctgaagtggaagaggtggtgcagagggggcaccgcccatgctgccctgcttccaactgctgcgcatagggggcggcaggggcggtgatctctacaccttccacccccccgccggggctggctgcacctatcgcttgggccacagggccgacctgtgtgatgtggccctgcggccccagcaggagcctggcctcatctctgggatccacgccgaactgcatgccgagccccggggtgatgactggagggtcagcctggaagaccacagcagccaaggtgagcattaagcagggcagctttgcccctgggtggttgaagcgccaggctggaatgagtaaggtctccacaagaccctgctgcctgcctcccatactcccatcagattggatggatagtcgtggtccagaccttcatcttcccaccagaagtgtgcacagtcagaagctctctgccagactgaccctttttggtcccgtttagctcatacaggacctgggatatcatcagaaagatatcacagtggggatgttctgaggccactagaggccaagtttagacttgattcagtttccagctttgctgaggcactctgttcctgggttagggcagttctatgttgaataatgtttttaataatctgggcatgtctttctccgtgacttgaggcagttagcctcagaaagcctagattcacatttgagttttgccactgcctcttggtaaagtcagctgtaggagtgttatggttattagactatagtagccaacattcatctagtgcttactgttatgagccaggccctattttaagtgtattgaatgtaggtggtactaatattatcctcatttacagtaaaggaaaatgaggcacaaagaggttaaggaacttgtccagggctgggcatggtggtttacacctataatccagcactttgggaggctaaggcagggtggatcacttgagctcaggagttcgagaccagcctgggcaacatggtgaaaacctgtctctaccaaaaaattaattaattttttaaaaaaagcctgggcgcggtggctcacgcctgtaatcccagcactttgggaggccgagatgggcagatcacgaggtcaggagttcgagaccatcctgaccaacatgttgaaaccccatctgtgctgaaaaaaaaatacaaaaattagccaggtgtggtggcgtgcacctgtaaccccagctactcaggaggctgaagcagcagaatcacttgaacccgggaggcggaggttgcagtgagctgagatcgcaccactgcactccagcttgggcgacagagcgagactccatctcaaacaaacaaacaaaccaaaagcttgcccagggtcacataactggtaagtggtagagctaggatctgaacgagctggagctgggggagagtgagcatgtttgaaaactggaccttagggcggggcacggtggctcacgcctgtaatcccagcactttgggaggctgaggcgggcagatcaggaggtcaggagtatgagaccagcctggccaacatggtaaaaccctgtctctgctaaaaataaaaaaattagccagacgtggtggcacatgcctgtaatcccagctactcaggaggctgaggcaggagaattgcttgaacctgggaggcggttcaagcttgggcaatagagcaaaactccatctcaaaaaaaaaaaaaagaaagaaaaaaaaagaagaaagaaagaaaattggaccttaggacagtgagggcagggatcctttgtaggaaagcacaagaaacacagacttgttcctagctgacaaggagtgtactgcctggtacctgtcacctgctgaggggcttaggatgtgagggagaatctgactacagtttcatattcttccccagaaatcatacagatttctccactcctgactctggtcatttctgtttttgtcctccatatttgcctggtgccccaccatcaacaggtactttggtcaataatgtccgactcccaagaggtcacaggctggaattgagtgatggagacctcctgacctttggccctgaagggcccccaggaaccagcccctcggagttctacttcatgttccaacaagtacgagtcaagcctcaggactttgctgccattaccatcccacggtctaggggagaagcccgggttggggctggtttccggcctatgctgccctcccagggggctccacagcggcctctcagcaccttctcccctgcccccaaggccacactgatcctaaactccataggcagcctcagcaagctccggccccagcccctcaccttctcccctagttggggtggaccaaagagcctgcctgttcccgccccacctggggaagtggggaccacgccttctgctccaccccaacgcaatcggaggaaatctgttcaccgagtgttggcggaactggatgatgagagtgagcctcctgagaacccgccaccggtccttatggagcccaggaagaaactccgtgtagacaaagccccactgactcccactgggtaagtggagtcctcacttggccctctcagtgttttactgcttttcgattccttgtatccctaggctgtgaggaggtccccctgcctggggggatgggcacgggaggtggaatagatggaatggcaagacctgggttagctctgataggaaaagaaaaatatgtgcaggagaacatgagaggtggggtggggcagtgcttataaaacaaccggagtgagcatgtcctgctttttacattcatatggctttaaccccattcttctagtgcctaaggatggggaactttcaggctcacactagaggtttttaggcccaccctatgtgtttttaaggacagagtccaggctcaccttagttctcagaccactgtgcctctgtggcctcaccctatgaccagccatagggtggcaaggtctaggccttctcctacaggtttccggtgacccttgtgtctgtgtcacttccttcagaaatcgacgtggcgtcctcggaagtacccagtgagcgctcccatggctccccctgcagttgggggcggggagccctgtgcagctccttgttgctgcctgccccaggaagagacagtggcctgggttcagtgtgatggctgtgacgtctggttccatgtggcctgtgttggctgcagcatccaggctgccagggaggccgacttccgatgcccagggtgccgggctggcattcagacctaaggtccaccgccaaggcaccatcggacacacctgcccatgagtagacacagcagcgagcaaataggtctgataaataccccccttcccttccctccccaagagggaatgactacagggaagaaggatggattgatgtggactcattcagggcctggagcagaccctggtggccaagacagaagagatggtttcctgccaaagatattgccacctccaggaaattgccagtgagctggaagttcccactattacaagccataaggccatgttgccatggacaccagaatatctgtagtcagagcacctatcagttgcaaaagccatgcctgcaaccgatggaaaatgtaagagggagttcttaaggttcttggtggcatcacccaaggcattctgggaaaacctagggcctggccccaaaacttccctactctgtggctagtcctgctgccaacaaaatcgtagcgacctggcttttcacagctttgcttttatttccaagtcaaggacaagccgcttcattcactcctgggcatttactcttcttgtgggtctgtgatattccttgctttccagggagaatgtgcttggcaaggtctggagaactaattcagaatcttaggggaaggggagagatggaaatacaaacctgcttactggaaaggtgcaaatatatgggttgagctggaggtaggaatacaggtaattaaggtttctagtttaagggaaaacagatctattgccatttaaataaggtaactgggatttggttaagttcacaaagatagcagaagatttatttacaggcttcacctgtactgtcagggcaagagaaagcctggtaaaccagctacagcagtttaccagtgtgatggctgtgacacagctccactccacgggtggacacagcagagggcaactgggctggcctggttcagtgtgaatcaaaccgcttaacccacacatggtacatgtgattttcttttgtgagccttacaccaagccaaactattgtcaaagcatcatttctatagaaataaagccttatcttgacctgttctattaaaacctgccacatccgccctttcctacctagatttaatgagcccaagtttttttacatggaagaaatgactctggggcaaagacccctaatgaactagtggcagagccaggaataaaacttgagtaactaatgagtcacttatgggcagagtatgcaaaaaccttaagtggaaaccaaatagaccctggtatcaagaaagcacaaagtattaatagaagtttctggttggggtgatcaaggttcaacagaaataagatgatttctaagtataaagccatttaagaattccagagtagggtgggaaagcaaaaagccagctctgaacaggtaacagctacatggtgactgagtctatgggcaaaagttcttgcatcacaggcttttgggaactagcctatcacagggccctgtacaaataaacttggctgcaatcccagctctccctctgatgttgtgtgaccttaaggagtgtaaatggcaccttagtttcagggtcacttgggtatgagcattggatattcccatccccacctcagtaactgaaggacaaaccaagataagtgtgtctatctactgtgtcccaagcttctttatttaagaaaaaagtgatacatgatgtgggattaaaatcaagagcatcattgaacttcaccttccctccaaccagttgccccaaactcccctgcccccaccctttgtgttcccaattccttccttagtgaatgaagaacttaatcccaaaaaccctggcacaaactccaggttttctttccctagctcctcccctccccctgtcccccattcctagaagggcaggcacctcagtttgaatgcatgggagagcccagagtggtgacagagacagggggaaaggcttccccctcagggaaagggaccgaggagtacagtgcagtgaagtgagggctcccatagcctggggtaccaaaatggggccctggggccagaggaaaggacactggtccccctgagaaaggagacccagcagcctcaaaatcctctcgttgtgcatagtcgctgcttgatcgcttgcccttctggcgccggttacagaaccacactcggaccacctgccagtgaatgacagaaaggagaatgacattagacaatgagctgagagacgggcctgactctgcttggacattctatccaaagccaacagccctagagcagttagaggaggacattagagaatgagctgagacaggcctgactgcttggacattctgtccaaagccaacagccctagagcagttggaggagccagagctagggaaagcgaggtggtgacaggggaaagagatggagcccgcagagagacatggcactcacatccttctcgagcccaagctgctgggcgatgtggctgatctgctgcagtgtgggtttcgggcactgcaggaacaaattctccaggttgcctctcactcggttctcgatactggttcgctttctctttcgggcctgcacgaaggtttctgctttgcatatctgtgcaggtgggaagggggtgacaagggcaagctttggacttgctgagtaacagcatcacaggggtctgtgactagatgtgtcagcagagccaggtggtggtgtgaaaaggcaggatcctggaagggttggctctggaccttatcccagcagaactgaggaatttcactccatcccactgagaaccactgcaccaaagacggagagctacgagccagtgatggaagcaatggaaattaggccaagaaagggaaggtccccgggtatccccctcccacccttacctcctgaagattttcattgttgtcagcttcctccacccacttctgcagcaagggccgcagcttacacatgttcttgaagctaagctgcagagcctcaaagcggcagatggtcgtttggctgaataccttccctgggggaggccagtcaaaagagaagcaaaatgagggagcacgcagggcccttgtgaccctgagatccaagcttaccacctcttcccagagggagctcaaagcccaagcatcttctccctctccctactcctcttcatgggtgagggtagagtctgcccctgcccctccccactaggttcagggatactccttagaggggagatgcggtcagaatctgcagaggggaacccaccaaatagaacccccagggtgagccccacatcggcctgtgtatatcccagggtgatcctcttctgcttcaggagcttggcaaattgctcgagttctttctgcagagctttgatgtcctgggactggattttaaaaggcagaagacttgtaagaacataaacacaccagttatcaatctcccctttccattcgggattcaagaacctacgtgtggccccaaggaatagtctgtagaagtgcatctgccttccaagctgcccacctaacttctagaaataacctacccacaaatgtcattcacccattccctgttcactgactcatgcatgtaacaaaggactactcttcccccagaaactggcacatccaaggggatgcagaagcatggtgaaaggacagaaagagagaccctggcctcgagggagaacacctgtcaggttatgaaggttagaagttctttgctgggcgcggtggctcatgcctataattccagcactttgggaggccgaggtgggcagatcacgaggtcaggagttcaagaccagcatggccaacatggtgaaaccccgtctctactaaaaacacaaaaattagctgggcacggtggcacgcacctgtaatcccagctactcaggaggctgaggcaggagaatcacttgaacccgggaggcggaggttgcagtgagctgagatcacgccactgcactccagcctgggtgacagagcaagactctgtctcaaagaaaaaaaaaaagaagatagttcatttaatacctgcaaaattctctcactcaagtatcacccccagtttaaggatgttttgagattagagaaatagataagctgctaagttctgggttaattaaaaaggaagagcatcatgtctcagaagctaaattcagtatatactctccccagcttgctttgagggtcccacaaactataacatggcatgcatacacacaaacacagcaaaaaagtaacaggtgtcataagaatggataaagtgctttgtgtgtacttactcctcattttttaaattgattatccctcatctttactgtatctttttcactatagaggcatcctaattgatttttaaattcaagagatttatcgagcaccttctataagccagcggctatacaaagtggacaaagagccctgacatccagcatgacagaagtgctattcggcacttgttcttcaagttgcccacttggatctcttccaagtgcactttccttttttccctgccctataactttttaataataaacttccactcctgctctgaaaaataaaaaagtaaataaaataaaaaatggccaggcacagtggctcatgtctgtaaatcctagcactttgggaggccaaggtgggcagactgcttgagcccaagagttagaaagcagcctgggtaacatagtgagacccgtgccgccccttctcccacccctgctgcctctatttaaaaaatatatatatattatggaaaaaagcaaagcagtccgggcgcagtggtcatgcctgtaatcccttcactttgggaggccaaggtgggtagatcacttgaggtcaggagtttgagactagcctggtcaacatagtgagactctgtctctactaaaaatacaaaaattagctgggcatcatggcgctcccctataatcccagctactcaggaggctggggcaggagaattgcttgaacctaggaggtggagtttgcagtgagccaagatcgcaccactgcactccagcctgagggacagagtgagactccatctcaaaaattaaaaaaaaaataaagcagtctataggagtagggtaaaggagggaaggagattatggaggagggtgacacttttaaagacagagaaggtgattgtttgagcaaaggacaagagtctaatgtggcaaggccctgaagtgggccttccagagcccaaagctggtctggtggctaggtagatcctgttgcagacatagtgactttgttttagtccaagtgaaatgatctctcaccctttttctccccccccaagacggaatctcgttctatcgcccaggctggagtgctgtggcgtgatcttggctcactgcaatctccgccttctgggttcaagctattctgcctcagccgcctgagtagctgggactacaggcacccaccaccatgcccggctaatttttgtatttttagtagatatggggtttcaccatgttggccaggctggtcaggagacctcaagtgatctgtccaccttggcttcccaaagtgctgggattacaggtgtgaaccaccgcacctagcctcacctttttttttttttttttgagagtttcgcttttgttgcctaggctggagtgcactggcgcgatctcggctcaccgcaacctacatctcccaggttcaagcgattctcctgcctcagcttcctgagtagctgagattacaggcatgcgtcaccacgcccagctaattttgtatttttagtagagatggggtttcgccatgttggtcaggctggactcgaactcccaacctcaggtgattcgcctgcctcggcctcccaaagtgcctggccacaccttttaaaacactgactctagttgacgtgttggccacagacagtagggaggaagcagtataatttgagaagctactgcggtaatcccagcagagatgatggtggctgaggccagggttaggttgtgattgattcaggatgtttcttaaggataggatgtaggacgtgaaagaaactgaggatgactgggtttggccttgagcaactgggtgatcagggtggagcagttcagggagccatcacaagagacagaaaacgcggtagtcatctggtgtctaaatggcatttaagccttgagggtgggtgagaggaaggaagggtagatagagcagaggttgaaggactgagccctggggcatgccatatgaggctgccggcggacagaggtgcacagctagtgagaaaaaaacaaggcctttttgtagtcctgaagcctcaaggaagtgtttcaatggtgcttgatcatatcaatttcaaataggctgttttcatccccaacttctgctcagccaataactcaaactgataaatgccctctgctatcctggattttccaaattctgttttggggttttggaataaacactggtccaaatcctcgcttcatcatttagcagttaaaacccgttaaataggataataatacctccccctaggagattttgtgctggttaatgagataatgatgtataaacggagcacacagccaggcacttaggaagtggaccacaattgccagccattatcattcaaggctcagcagtgacctcctgcgaagaggttggggcttctcggtcactccagaaaccagtcacacctttctgtgaggtctcaaggcttagtatttaatctctaattgcttacacttgtcgccttggaggactggaagatacatctttaatagtcctcagcagggctggatgccttcaatcccgcagcagctctatatttgcaaatggcctggagaaatctctcaccatttttcttgtttacaactttggaactgaggctgaagtcaatcaaaatccagctttctacaaggggtgccagggtgtgcaccttaacacagtggccagtcattggcctgaggcagagatccggggaagacaagccctatacttgactggaggtaaacccagctcacaacgcgcacacacacagcccaaacaggagatcctatcagaaacgagtcacaccctaaactttcaggaacaataatcctggaatgagcactgtttttaccctcaggctatgcttaaccctaaggccaaaatcttgggtctgataagggtcaaattttcaagcaggactaagggtgggaaaaggggctcaaaccaaccccaagctgggtctggtgctgggccagtaatgagtgaccagaccctgggcaggcctaggagatgtgagagaccctgacaagggctgggccagacagagcaaaggccagcctgggccagcttccgactctcccaggccgctctgccctcacctgcagttgtctcttcgaaatccagcttccagttcccacctggcccctgcctgccagggctgcctgcagttgatacacacccctccctggccagggcagctgaccctgcctgctcctctcctgggtgccaggtctgggcagctgcaggtgaccacttccccatcaggctgccctgtcatgaccacctccccacaccccaaccccgtcgaagctcacttgcctcctccgggttttgctccagcttctccttctccagcttcacggcaccaggggtgacggtgcagggctccggggaggccccatcggagttgctctccaccccgactcctgcttcgccctcaggctgagaggtctccaagccgccttggggcactagccccactccaacctggggcccacagtacgccatccccccacagaactcatacggcggggggcatgggggaatcccccacacctcagagcctggcccaacccccggcccgattcctggccctccaggagggccttggaagcttagccaggtccgaggatcaacccagcccggctccggcccccctggcccatcacctccaccacctggagggggcgagaaggcaaaatctgaagccaggtgtcccgccatggggaaggaaggcgccccaagccgggggcctggtgaaatgagggcttgcgaagggactactcaacccctctctccctccccagtcccacccactagccttgacctctggccccgccccctggatgggtggaggagagggaggtggggggagaaactgaggcgaaggatgtttgcctaatggtggtggcaatggtgtctgtggaaggggaaaaccgggagacacaactggcgcccctccaggacctcagtgcaggtcccccacagaaactttttttatttttattttttaagacagggtctcactttgttgcccagactggagtgcagtggagtacaatgatggctcaatgtagcctcgatctactgggccaaagcaatccttctgctccagcctcctaagtggctgggactacaggcttggaccactgtgccctgttagtttttttatttttagtagagatggggccttgctatgttacccaggctggtcttgaattcctgtcctcaagaaatcctcccgcctctgccgcccagtgtcatgattaaaggcgtgagccaccacacccaactttcaactcccaacccgctccctggcactctctcaggctctgcacatcccagctgtctggaatcactcccacacctccatgttcttcaggaacccaggtgcttgaccccctctccacagacctctggcactgtgccttcaggggccagtcaccctctcagctcctcaaatttattgaatgtgtgtgtggcgctatccctcaatgcatcaacagccataagcacaatggccagctgctcccttatgccttcccccgatccatccagaatcctaggcattcccatcccgatactggccaaatccagccaccccgcagcctgggtgcctggcaccatctgcccagcctgccaaatttcaccccatcttcaagagtagactgccagacaaggcctccgtgctatatccccccaccccccatccccccacccctccgtcttccagaatcagactccagactctcctcatctaacagactaaggggttggcccctacttccccttcaagggaccagactttggactgattgggcctcagtttcccaacctttgctgaaacagagtgataagacacccgctttgggccccctccactatggaacctgcacatcaggttccttgctcccctctcaaccaaaactcagacatctaataccacggtaggccccgttctccctcccccacctccctggcccaggcctccagccctaggccctgggtggggaaaaccagggggtggggggtgtggagaaaaaatatctgacttcaggttcaaagaagcctgggagggactgggggaagggggcaggacaatggccttggctggacaatcccggtccccagagggggcagctctaaccctaaacaagtgctcaacccttgaatgggcctggatggctcccctggggactgcttcctgctccccaaccccccagtcccaatcccctcacacagaatccccttcagagacgctaaaaggagctccagcaacccccctctgcaatcccctcaaagactgagcctcagacgggcaccaagggccccctacagggacctaggtatctagttcctccttcctctgggggactcaggcgtccagcttcatcgtgcatccctccccgagcccggaagattgagggatgtgctttgtttagtggggctggctggcagaaagacgcagaggaggtggcgagtgatttgtggaggggtgcaggaaggctgccctaagctccccttcagggtctgtttttctgggcctggcctgagtatcctgaggctcatgctgctggtctagtgcttgattctgtttgcaagagaatagccaacggaatgcctgtctgtgagggatgatgtttgtctgtctgctcccaaaacttgatctcagtggagggcctggggtaagtctgggggctccagagggggctctgggccagggctccccacagcttcgaaggccagaaggccaggtctggactgggcacgctgacctctgtcgacttaagtaaggcttctcattgcaggctccaggctcagccctgcctgggcttgtctgctggggtcagtggctctgtctgccttctaaggggatgggtgtcccgtggccagctgtcttcatcttggtggcatccgtgagtcttttgagacttttcccccactcttatgttgcctctgttcgtgtgcccatctcctgtctgtgtagactttttgagcctaattgtatgcgtgcatttcaatacctgccacaggtctgccggaaggtctacaaggcagtggggttgcagctgtgttcacttctcggcctttaactgcccaaaaggcaggtagattatggggcctggtgggggtgggaggaacatgcttcggaacaggaggaggcccctccccagccatctcaatccccaggacagaaccatcacggcacctttgtcatgcatctctctgctgtctgccaagaagacggcctctcagaggagggggaggggcaggcctgggatttggctggaatctccacaccagtgtttctcagcttgccatcctccaggttccccaaaagcgctcttcccaagccagtccagagagtccctgctgcccattttcctagtggctcctaaaacaccttccccaatttccccactcaacaccaccctcttgtttttagattataatttgtactgtaggtggtgtatttctggcctgggcaagaggcccattcccgagagggacgcagacaaggggtgggtgcctgggtccctggctgccttgtggctggatatgagcccagtcaggggtcagcctcctgcatgcctagactcctagccggcccccttctggggtgctcagggctgatgggaggttgaggcaggctttccttccttctcactgtcctgttatgcctgaagggtaggtggcttcacttcagccaaggccagctctcccaggccccaaccagtgctgggggccaccgttgggcctggaggagactggaagccaggctgagtcatcagaactggtcccatgattccctgggttttagaaagtcaccataaaaagatacttcacacacacctttattattacagtgcaatgtcaagacccttcacagagcactgccaggggacccaggtgaggcccacctctccccaccaggtgtggcggctggcatggctgggtggggagaggtgagatgagcagccttgctgctctcagcccagccttcccttcccctcactgggagatgaggtgctgtttggttgaaaaaccagctgaaaaaactcagttgggaccaatagagacttgctctcgacccggtctaggaaaccacttattttgacttccgaggcctgtcaatctgaaggcaaaagaaagggaagaaatggagggctgagggttcaggcttggcccaccttgggagatgatctcccttaatagcaatttagacaaattcctttgctcactgtggaccaagtcccctcttctcaacaaaggaccctctgatctcccccatgagacctgcaaactgaggtcaccttatcccaaatccagacactcttacctcaaatagaggagtcaactctctagctgtagcctgtagggagtcagaggtgagagcaaaaggagtgggtgagctgggaggattggtcaggaacaaactaggaggcatggaccaggttctaagtcctggctctgactccctggctaatggcacctccccctcctgtgcctcagtttcctcacctagtaaagaggatttggactcaatgaactctaaacttccttccaactaagacataaaattgctgccccgctctcatatgccctcccatctacccaccccacttacttgacatgggaatgtagacttctctgcacacctgtgaagagaaatgggggtaggaaagctgggagtggtgttcaatgagaagttggcataggcctccctgtaccctgccacctacctccaagcatccttcctggggaatctggcaggttttcccctgaagtttgatcaagagatataggaggaggccgggagcggtggctcatgcctataatcccagcactttaggaggctgaggcgggcggatcacttcagatcagcagttcgagaccagcctggccaacatggtgaaaccctgtctctactaaaaataccaaaaggtggtttttttgtttgtttgttttgttttttttgcatgtggtggtgcatgcctgtaatcccagctactcaggaggctgagaaacaaaaatcgcttgaactcaggcagcagagggtgcagtgagctgagatcgagccactgcactcggcaactgcattgctacatgcctccaaaccccagctgctcatctgaggttgcacagagactcagcatcagcctggtgcatcaccagacaggagagcctatgctcacgtcaaagggatcacagcagactgctggctctgggcatctgagcagcgccatgcaagggggcaagtggcttagggttccagggactcaggggctggggcagcccatccctcagctaagttagctggacactggaggatagaagtcaagggcctagcatgttgggatggctcctctccaggggctttgcagagagtcccatgcaccaagggggctagcgggacagggaaaagtggtggcaaagacctcccagacaaactggctgcctctggtcctatcaagctgccgtacatcctccacaccagggctttaggcaccattccactgtgttccatggtgactgtaggtgatgccccaccttgagagcccttgggtgctcagccctgggtcagaacttgaacaccaagtgggaaaagggctgaccaagcacgggagagggaaggaaagcagagtggctaggacggtcagcaacagagctgtgttcatttaggacatgggtattgaaatggagttttgaaggctggctgaggggcctgcactccatccctcccacagtgccctcagctcctccaccttccccacatgaaccagtccgcacctatcacacctacggtgggccgtggtcccaccccagctttcaggtatttccggagagggtagacgcagctctaggtcaggaaggattgtttccttcccttctctccttctgcagctctgcttggttctggctggcttttgctggagttgaaagactcaagtgtgctaagaagggagtcctggccatcacagttgtagtgccagtgtccccagctgctccggttccccaacaactcacagacaaccgtggtctggagggtgtgtgactctgaaaagccaaaaccccagaactccaaagttacaagaggtcaaaacagtggctctctccacctccgctcctacctcctcccaaaatgcatgaaattcccttgctctgactgataaaccctcactcattctccaagacatatcttctctgtcaaccacatccccaccaaagtcacactgcacccgctctccctcccctgcagcatgtggctccctcccatgtacccagcatgcactgttcagccacatatactcacccaccctcctgaaggcccagcacagacagcattgtgtttaaatccctgatctacacatcagctactggctatatgcccacggcaaatgtaatggaacctctccaagccttgctttcctcatttggcaactggacacaattatagtctctaccacacaagtaaagataacatgagataatccttgccagtgttaatgtaggacctaccaagaagaattcaagaactagtagctgctattgtaaggtgtattattggtaacagcaaaatgaacagcacttactaggcttaaatgtttgctagatgaaaaaaaatgatattggttagaaatatattttcctcaggtcaccaggtttcttattaactactggtggtggcgagagaggtgaatgtcagaaaaaggccagtttttcccatttcctggatttgagaaagttggataaatttttttcacctggccgggtgcggtggctcacgcctgtaatcctagcactttgggaggcccaggcaggtggatcacgaggtcaggagtttgagaccagcctggccaacatggtgaaaccccatctctactaaaaatataaaaattagccaggtgtggtggcaggcgcctgtaatcccagctactcaggaggctgaggcaggggaatcgcttgaacctgggaggcggagtttgcagtgggctgagatcgggccattgcactccagcctgggcaacaagagcaaaaaaataacagacttttttcacctgaagggaaggcttgggagcttaaggacaatggcttctttcttagagacctagtccttgactgagggaaagggtgagggtcttatacttctttttttttttttttttattgagacagagtcttgctctgtcacccaggctggagtgcagtggcacgatctcggctcactgcaagctccacctcccgggttcatgccattctcctgcctcagcctcccgagtagctgggactacaggtgcctgccagcgcacccggctaattttttttgtatttttagtagagacagggtttcactgtgttagctaggatggtctcgatctcctgaccttgtgatccacctgcctcggcctcccaaactgctgggattacaggcatgagccaccgcgcccagccagagggtcttatacttctgtcctactcttgctaatacctaagacccagtccttttggcaccactgggtacataaaacaaggtttgagtcagggatgaactcccccaggcaggaggagatagcatcaggatctcagtgaagtgggatggtatctgagtgcctagcacagtgccccacgcagagctcaatgcatcttagctgaacaataacgaatgcagctgcacatcttcaggcccatattgagctcttctctcttttctgcctcctcctgagcccccaagcccaatcaccttggctctggttgttgtgtgccatgatgctccccaggatggtgacaaggtgctgggctctggccttcagtctgagaaccagcttctcccaagctcttgggtccctggcctgagcccaggatgcacggggctctgccacctgccctccttgcagcatcataagaaagggtggtcatccaggtagcctgagacttcgtaaggggcttgccagggctgggctgggaaagagtaatgaagtcatagcacagagagtgggttgctgaggaaaagagaatgatgggaaagggttattttccaacaggagtcttacctgggagacactgcacaaggtgcctgtgtggtgaggctgtgtgactatttttgagggcaccaaaggagtgggtaaggggaatgcagactgaacaatgggaagggaatctcttgtttccctgcagggcctcatctaggctcattgttttaaatagtaatgactcccaaatctcttcatccctgttcttcacattggtatatccaactacctacctgttggtcatctggacctaaggttccatatggccttaaatctgacacatccaaaactgagtatttcctcttggccctggccatggaacaacctgcctctcatcctatattcctggtgagtggcatcatcctctcacctgcctgcttactcaagccagaactgggttgaggtgtgggcaactaccggatgtcatgtagcctcctggcacaatagcatgaagtgagctgagaggtcatggaacaaaaaggctcacagaccaaatgtaaatgctcaaataacatcgtttattaaataaatgtaaaacacattctgagaagcaggaggcaggtgctggggtgggtcaacacacgggagagggggcaagttgggtggaatgatcacaccagctgaactgtgggtcatgcagtgtgcatccatcctgtcaaattgaaacctcctgcatcctgagtgcctcatgtctcacgtatttagggtaccgtgaatatttagtgcctccttggtctttctgtcccttttgatctctgtacacacgaatatgttgtactatctacagatgactaatttagttatctatgtgtaacacttcttttgagtttattgttttcctgtcttctacagcagaattggatattcccaaacaatcggcaagtctggtgtttatcctagagtgctgcctcccttcacaccccctagtttcaaacagtcagcaagccctgcccatttttaacttcctgtttctccaatctggacattcctctacctccaccaaaccagcccatagtatggcttgcttggattatagccagagtctttctaactggtctctctccctccagtcttaagcatataaaatctgtcctccttgatataatcagagtgatctatccagaaatacatatcagaccgcatacctctctgctcttcctctaaggattccccttttgtcctcgggatggtttccaagctccttagcaagctaaacaaggccccttgaaggctgccgtctccaccctcatctcccaccacaccctgccttcacctgacccacttggaacaggaaggttggagcacctccatactcctgcagttccacctcccagtgccttcctgagatggtcccctgaagggaagacccatccttcccttctccaaacaccacttaaaccacttaaaccctttcattaaacccttaccctggcctcaaaccatctaccacgctgctgtacccctttatttcagagacggctctgactctcactcagaggtgacactcaccctaccacttgtctatggctgtgcatccctcttggggccatctcttgtggacaagaatatgagccacattcttcatatatgagaaaattacaccaatctcagaggattagaggtcatgccaaaaaacacacctggtagttatgtttaaatatatttttaaggctgggttaaaaaccacgatgaggcgaaaccccatctctactaaaaaaatacaaaaattagctgggcctggtggtgcacgcctgtaatcccagctactcaggaggctgagacaggagaatccctagaacccaggaggcggaggttgtagtgagccgagattgcaccactgcactccagcctgggcgactgagtgattctccgtctccaaatatatatatacacacacacacatacgtatatatatgtgtatatacatatatatatttttttttttttaacaaacatagctgctatcattggctccttttctcttttttttcgagacggtctcactctgtcacccacattgaagtgcagtggcacaatcatgaggcccaccccaacctctgcctcccaggctcaagcgatcctcccacctcagcctccagagtaactgggactacaggcgtgcaccaccacgcctggctaatgtttttgtattttctgtattgacaggttttcctcatgttccctgggctggtctcaaactcctgtgtccaagcaatcctccgcccagctcggcctcccaaagtcctgggattacaggcataaggacctcctacggccaagtttaagcttcaagtgggagacatgggacaattacttaccagatacaaccagtttcagaggaagccctacctaccctctaagcctgaccttatcttgcaacctccatcgccccagacctcccccggctccaaaaagcactcccaagaggcctcataaaggccacagtttggggaaggttatggctcaggggaaggggagaggtgctaaataattaagcccccctactactcagcacccgcgtgaggcatcgtcaggcatcgtcaggcctccagtggtggtggtggcaccgggcctcaacctccccggagggctggactctcgctgccaggctgtggggatcaggcgttgtgggggagggggacacttaacaggtatggagggcggagcagagccccgcagtcactggcctgacttccggaacgaaccgtcgccagcaagcacagcagtaggaccagggggatgcaagagcgggggcggccggggatcgtgcttctcgctcaggtccagattccggcaaccaggccggcggaatcacgtgccatgctccaggccagcgtagtcccgcccatcttccagctgagcgtaccgggaggctcccattggactggagctgctacggaggcgggactttccctttttcttgaaccccattgggttaagtccagtccgagacaagcgtctctcctcagcagtgggaggggtgatttggctcatccatacttaggaatttggggtttgaggccgggtgcggtggctcacgcctgtaatcccagcactttggggggccgaggcgggcggatcacaaggtcaggagatcgagaccatcctggctaacactatgaaaccccgtctctactaaaaaaatacaaaaaaattagccgggtgtggtggcgggcacctgtagtcccagctactcgggaggctgaggcaggagaatggcgtgaacgctggaggcagagcttgcagtgagcagagatcgcgccactgcactccagcctgggcgacagagcaagactccgtccccccaaaaaaataatttggggtttgagacccggcgcggtggctcacgcctgtaatcccagcataatcccagcactttgtggggggccgaagcgggcggatcacctgaggtcaggagttggagaccagcctggccaacatagcgaaaccctggcgcgcacttgtaaacccagcttctcgggagactgaggaaggagaatcgcttgaatccgggaggcggaggttgcagtgagccgatatagctagcgccactgcactccagcctgggcgacagagtgagactccgtctcaaaaaaagagagagaatttgaggtttaagttgtctctccttggtcgctgtgcagtcgagtgtttttatgttcagacctcttcctgcccattttatttatttaatttattatttatttatttatttatattttttgatatggagtttcactcttgttgcacaggctggagtgcaatggcgcgatctcggctcactacaacctccgcctcccaggttcaagcaattctcctgactcagcctccctagtagctgggattacaggtgcctgccaccataccccactaattttttgtatttttagtagagatggggtgtgtgtatacatatatatatatatatatatatatatatatatatagcaagtagtcaagagctagtctattttgatagatagcatttctcatcagagtctcttgccgggcaagaacagtcaaggtttgacgggttttattagtaataatttctaaacagcttgcaaccatatgattcggttgagcatgtagatgggggttcgatatcctcatgagccatcttgtgtctaagtggcaggcctatagtattatataatttttttaggaggtcatttatcatctttccaattacctatggctatgcttcgtttttcgcaggaagcatagactgggaagcccagaagtttacctgtttttatgggcagtaagaagaaagatggcttaatggtgccaattacacagctacctgtccactgatcagggagcttagcataagctctgcgtataacccggtgggggctgtccagtcccggtggagttctgggtgggcccaaacagtctgcaactttggaaatttactgaatggatttctttctgtgtaattggaactccaccatgtaactttttgtggtaccattatacagtttttgcccaagacaactaagccgccaaacaggatcttttttatcttctttttaagtagcccaaatgacacaagaccagtattgacacatctcacataaatacaattcttgacagatacacttattttttttttactgtgtcactttttttttccaatttagagaaccgcatcctattccatgctgcttactatcaatagcggcacaagcaccaaattttaaggttacatttttgggggcccctcttttttccgttctagctattaccttacttgtgtcacctagaaaaggaccagtccttaattttattttaaaaactgtgatcacgggaggcttaaaatgggtcataacacacatcaggttggttattccctgggctacataccttggatagcattatacaaacaagtttcttttagagtcctggtacacttataataaccataaaataataggactgtagcaatttttgtcctacctcagtgacttgatgtatatactggaaacagttctcaatctgaggaaggtcagttgaagtccttactgtacaagtccaaattttaaggaaaatgagtcccgcaatgagtttcctcatgcttcgcctgtgcgtggaccagtcagcttctgggtgtgactggagcagggcttgtctccttcttcagagtcactttgcaggggttggcaaagccgctcccatccacgtacagctcccagtctactgatgtttaagggtggtctcggaggttaggcctactagaataaactgagtccagcacctctaaacagttatgtttaactgggctctctgttaccaggagtaaggtggctgggttagggtgttggaaacttcaatggttttgtggggattttcacagagcaaggtttggtatctagttagtctagcatttattagctaatgatgtcctttggtatttattaaagtcaccacagcatggggagactttctgtttaggttttgcctaagagttagctcatctgcttcttgtgctaacagggcagttgctgccagggcccttggacatgggggccagcctttggaaaccccgtctagttgttttgagagataggcccctggccttgaccagggccctacagtctgggttaaaactccaactgtcattttttctctttctgacacacagagtgtaaagagttttgtcaggtcaggtagcctcagggctggggccgacatgagtttttctttttaactaatgaaaagctctttgctgttggttgtaatagatgtagtttatctaatctacatttttgttgactgtcatctactaaaatattgacttaaatcctgtaactatttgatttcaagctttaaattgatctggtattccttgtggggctccaattgcatttaagtagatgtgagaattgaaagacctataaggggcttctctcgttttatgatgtcttactttttttttcctctggttgatgaaatgccagggtgaaagggatagccaaatggactaaagcacaagtgccactctagttattcagcagagtgcccagtaaaggtccaccccgataccaccacacatcctctcggggatgaacaagggctgactgattgataagctcttggaaactcttaagctcactgcatcccttcaggtctccaaggaatgctaaatctcctccctgccgtgagagacaagaagtgaacttagtgttgggagatggaagctggatggccctcgggggctgacccacagagacttcgggatatagcagagagagcttggcatgacttattactccaggctgtagaatcctggaaaagagctaccatgcagcccacacctggtcgactggaggaccaccttagtggaagagggacaatcagggctctggcctgccatgtgcacaagcataacaattgattttgtttaacgtgcagatggaatatttaatccattccaaccaggcatttgcatcttggtatgctgtcttaactgccaaagtttgttttaagtctttaacttctatgatcctctagtaaaatgaatgtttcctttagcatctatttttattagtttttagaccaaagaaagctaaacaccattttatatttaataatgcttcttgtatgatttttataccaggtaagctaaattttacctttatattagtgtgttattaatgttaaacttaattttaataaaactttgtagacatatttatccaatttttcatgtttgaccataaggtaaggttttatagactctttttaaccttttataatttttgttaaagagcaggttgatgctttaagaaaaacctgtcacatttttactttaatgtccagttcacagaaaaactggatgatacctttttaactttagctaatatgtttacacacagaattttctttacaattaacattttaaaatttgcttacactttcaaaacaataatttttttaaccttttaatgtaggtaaaaatccacattcttatgcctccttataatctttttaccaaaggtatattttacttttcttatacaccttgcacataaactgttttttttttttaaatagtactcaggaggccttattacttttaaattacacaatattttttgcataaatttttttataaaattttttctttcacgactttcgccgacaattcttcaacatgtctcaactttctgacttattacaaacatttttttttctttaaacaaccagttaatttatttcaggacaagaatttaccatataacactctttttacataaattctgcctcccccgcttttttttttaaagtgaactttttttttgtctttggactagaccgtctaaggccacaagattagaagttaccataatacatgttatactgttaatttttagcaaacttcacttttgttgaaaaccttgtaagtttgggatttcaattatcctttgctattaataagaccttgtttagtctaaattaacttagaattggtatagatggcctttttttctctctgctggtctttccttgcctctgccagatgcttatgctactgttctcttaactactgtagggggaagggggtctaaaaccagctgtaactgtctatgtacagaaactggtctggatgccttggcttacaggttactttgtgtcatacctttgaaacaagggacctgtccaggcttccttctgatggccaacccacctctaatgctggccagtctatttcacaagttctaagttttcctggtgtcacagtaacatcgtaatctcccttaaattctttcttgaaaaaaaaatttttttaacatagttcctagtggggtgggcttatttgtgcctgacccatgcttcttcgagacaaaacaccacgctcacaccacacgtgcactacaaaacaaaaaaacagggcacacacacttttgcagtttacaccaaaccaaaatcagagtatccaaaaacccaagccaggtcaaaaccaaaaccaaaaccaaagtatcacacaatctaagtcaagtcaaaaccagaataaaagtgccagtacaggcacaccatgggtgatcaggccatgcttccactcagatggagtggggcaagttccaaagactagtcttaccaagtttcagatgtccggactccaagtgccagttccttcccagtgttcagccagtgtgttaatcctcctcgggggcctgctacgtgctgctctggcgaggcgttccacccggggaatttcctacccgggagcgctctttggatcgcgtcactcaggctggccagagtccaccgcagggatgctccacagggcaggcctaagccacccaaggggctgccttggccgtccgtcagttacctcgcttcctgttcagggaaccaagaaatgtagcaggacgagccccagacaaaacctttcagacaccgagttgtagaaggaagggctttattcagctgcgagcatcggcaagctactgccttaaaatccaaactccctgaatgcacaatttctgtcccttttaaggtctcacaacactaaagatttcacatgaaagtgtcgtgattgatttgagtacgcaggtggtacgtgacaggggctgcatgcactggtggtcagagagaaacagaacagggcagggagtgtcacaatgttcttctatacaatgtctggaaactaggaataacatcgcgttctaagtcatgggttgatttttaactactgggtttaggccaggcaggcccaggcctggttttgggcctggcgccaggctgcctgtctttggttttacttccttgttttttcttaaaacagatactgagtataaagcaatataaaacaatacgaaagggtctctctcttccctcaaagggaataggctgctgtggagaaaggtaaataaatggtggaaagaattacatgggggattaactaatctgtataccaaatccccacgacaggcaatttacttctataacaaacctgctcatgtaaaaggtttttggccgggcatggtggctcacgcctgtaatcccagcactttgggaggctgaggtgggtggatcacttgaggtcagtagtttaagacaagcctggccaacatggtgaaactccatctctactaaaaatacgaaaattagctgggcatggtggcacgcacccgtagtcccagctactcgggaggctgaggaaagggaatggcttgaacctgggagggggaggttgcagtgagtcgagatcatgccactgcactccaggctgggtgacagagtgagactgtgtctcaaaaaaaaaaaaaaaaaaaagcaaaaagtttttaaaagaaaatagtggaaagacagagaccctagaagagggagaaggcctaaggcaatttcttcttcctctcttccccatcattctttcagccactgtggagagagggagagtacggggtgcagggtagatgagagtagacaattctgattatttgaggagggtttgtggtttaggaagtgagcttctcaccgattttatttatttattttgagacggagtctcactctgtcacccaggctggagtgagatctcagctcactgcaacctccacctcccgggttcaagtgattctcctgcctcagcctcacgagtagctgggactacaggcatgcaccaccatgcctggctaattttttgtatttttagtagagatggggatttcaccatgttggccaggctggtctcaaatttctgacctcaggtgatctgcccacctcggcctcccagagtgctgggattacaggcgtgagccccgcacctggcctaaaaacttttatattaagttcaggggtatatgagcaggtttgttatagagataaatttcctgtcacaggggtttagtgtacagattagttaattccccttgtaattttttccatcatttatttacctttctccacagcagcctattcacctaacaataaactgagtgcccattatgtgccaagaactggagataaggatatgagtaaggaatcttacttatctccagttcttatagcatatactcattctgtttctctttcctttggcctagtttgagtgcccagcaggtgtttcaagtcactcattacgtatctactctgcgaaagttgtttgtgcagcctgtttatcctctcctttggaacttcagtactcttttttttttttttgagacggagtcttgctctgttgcccaggctagagttcagtggtgtgatctcggctcactgcaagctctgcttcccgggttcatgccattctcctgcctcagcctcccgagtagctgggattatgggtgcctgccaccacgcctggctaatttttttgtatttttagtagagacggggtttcaccatgttagccaggatggtctcgatctcctgaccttgtgatccgcctgcctcagcctcccaaagtgctgggattacaggcttgagccaccgtgcccggtgtgccctgctaattttttgtattttttttttttgagatagagtctcgctctgtcgcccaggctggagtgcaatggtgtgatctggctcactgcaatctccacctctcgggttcaagtgattctcctgcctcagcctcccaggtagctgggactacaggcatgtgccactacgcccagctaatttcttgtatttttagtagagatggggttttactgtgttagccaggatagtctcgatctcctgacctcgtggtccactggtccacctgccttggcctcccaaagtacaggaattacaagcgtgagtcaccacacccagccaattttttgtatttttaatagagatgaggttgcaccatgttggccaggctggtcttgaactcctgacctcaggtgatccttccacctcggcctcctaaaatgctgagattacaggtgtgagccaccacacctggcccaattatcttatttattatcattattatttttgagacggagttttgttcttgttgcccaggctggagtgcaatggcacaatctcagctcaccgcaacctctgcctcctgggttcaagtgatttttctgcctcagcctcctgagtagctgggatcacaaacccctgccaccaccctcggctaattttgtatttttggtagagacagggtttctccatgtgggccaggctagtctcaaactcctgacctcaggtgatccgcccacctcggcctcccaaagtgctgggattacaggcatgagccacagcccccggtactttttattattaacattaaaatatttttgtttaattaatttatttatttttaaaattattattattactttttttactttaagttccaggatacatgtgcagaatgtgcaggtttgttacataagtatacatgtgccatggtgatttctgcacctatcaacctgtcatccaggttttaagccccgcctgcattgggtatttgtcctaatgctctccctccctttgtccccaaccctattttatttttttgagacagagtctccctctattgctcaggctggagtgcagtggtgtgatctcagctcactgcaacttccacctcccagggtcaagcgattttcctctctcagcctcctgagtagctgggactacaggtacacaccacacacctggatgatttttgtatttgcttgcagagacagggtttcgccaggctggtctcaaattcctgacctcaagtgatccacccactttggcctcccaaaatgctgggattacaggcgtgagacaccgtgcccagcaaaaatatttttattttaaaatttattaaatttattaaaattttattttaaaatttcaccatttacaaaaagtgaaatgatcagatctttagcaaatccatcaatgaattttgacaagtacatgtcacccacacccctgtcaagatatagaaagttctctttgccctctttgattctgccctacccctgagtagccatggatctgatgactatcactatagagcagtttttcctaatttttttttttttttgagatggagtctcactctgccacccaggctggagtgcaatggcacgatctcggctcactgcaacctctgcctcctgggttcaagagattctcctgcctcagcctcctgagtagctgggagtacaggtgtgagccaccatgactggctaattttgtacttccagtagagatggggtttcgctatgttcaccaggctggtctcaaactcctgacctcaggtgatccacccgcctcggcctcccaaagtgctgggattacaggtgtgagccactgtgctgggctgcctgttttaaaacttcctataaatgcatgcataggtatggcctcttttgtgtctggctttttgtatttggcataatatctatgtaatccatccatgttgttgcacctatcagtagttcattctttctttaaaaaaaatttttttttttaaattttgagacagtctcactgtcttaggctgcagtgcagtggtgagatctcaggtcactgcaacctccacctcccaggtacaagcatttcttctgcctcagccccctgagtagctggaactacaggtgtgtgcaccaccacgcctggctaatttttgtatttttagtacagatgggatttcccagctactccagaggctgaggcaggagaatcacttgaacccagaaggcagaggttgcagtaagccgagatcgcaccactgcactctagcctgggcggcaagagtgaaactctgtctcaaaaaaaagccaggtgttgtggctcacacctgtggtcccagctagtggggagcccaagagttcaagccttcagtgagtggtagtcatactagtataccccagcctgggtgacagagtgaaaccttgtctcagaaagaaaaaaaaaacaagatgaaggaaagcatatgtagtttgctaaaatttatgtggaaagagggaaattatatgtatatacacacacacttatatttgcttgcatatgcataaaacgtctaagtttgtttggtttttttgggacagaatctgactgtcacccaggctggagtgcaatggtgcaatctcagctcactgcaacctccgcctcccgggttcaagtgattcttctgcctcagcctcccaagtagctggattacagccttctgccaccatgcccactaatgttttgtatttttagtagagacagggttttgccatgttttccaggctagtctcgaactccttacctcaggtgatccgcccgcctcggcctcccaaagtgctggaattacaggcgtgggccaccaagcccgaacaaatgtcttaagtttgttttctttctttctttaattaattaatttatttatttatttttcgagacggagtcttgctcttgtcgcccaggctggagtgcaatggcaagatctcggctcactgcaacctctgcctcccgggttcaagtgattctcctgcctcagcctcccaagtagctgggattacagatgcccaccaccacacccgactaatttttgtatttttagtagagacgggggtttcatcatgttggccaggctggtctcgaactcttgaccttgtaatccacctgcttcggcctcccaaagtgctgggattacaggcttgagccactgcacccggccaagacagagactttttgccttttgaaccttttgaatttttaaccaagtgaaaacacaaaaggtaattccaaggaggaaaaaaacccaaaaaactcatagtgaaaatttaagaaaaaaactcagcctgatagaattctcttaccttcattaagagaaaacaaaaattgtagctggggccaggcgcggtggctcacgcctgtaatcccagcactttgcgaggcagaggcaagcggatcacgaggtcaggagatggagaccatcctggctaacacggtgaaaccctgtctctactaaaaatacaaaaaattagccaggtgtggtggcgggcacctatagtcccagctactcaggaggctgaggcaggagaatggcgtaaacccgggaggcagagcttgcagtgagccaagatcgtgccactgcactccagcctgggtgacagagcgagactccatctcaaaaaaaaaaaaaaaattgtctaaaaattatatcactcctttttttttttttttttttgagatggagtcttgctgtgttggccaggctggagtgcagtgatgcaatcttggctcactgcaacctctgccttaagagctcaagcaattctcttgcctcctgagtagcagggactacagttgcatgccaccatgcccagctaatttttgtatttctagtagagatggggttgcaccatgttgactaggctggtcttgaactcctgacctcaagcgatccaccgtggcccaccctcagcctttcaaatttctggcattacaggcatgagccactgctcccagccaaaccgcagtctttacaagggattcttttttttttttttttctgatggagttttgctgttgttgcccaggctggagtgcaaggatgcaatcttggctcactgcaacctctgccttccatgttcaagtgattctcctgcttcagcctccccagtagctgagattactggtgcatgctaccacacccggctaatttttagtagagatggggtttcaccatgttggcccggctggtctcgaactcctgacctcagatgatccaccctccgcggtctcccaaagtgctgtgattacaggtgtgagccaccatgcctggcctttacaagggattctaatggtctaatgcgacagttgtggcttcagtgagctcagggtgccctctggtgtccatgtgggcccaaggatgtgatatttagaaaaaacacttgtaattctgggggacatgtaattgaagccacttgccaacttttcaagattcttattttttttttttttttggagacagagtctcgctctgttgccccatctggagtgcagtggtgcaatcttctcggttcactgcaacctccgcctccctggttcaagcgattctctgcctcagcctctggagtagctgggactacaggtgcatgccaccatgcctggctactttttgtattttttgcagagacagggtttcaccatgttggccaaggtggtctggaactcctggcctcaagtgatccattggccttggtctcccaaagtgctgggattacaggtgtgagccaccatgcccggcctttttattttattttattttttttgaaacagagtctcacttttttgcccaggctggaatgttggtggcctgatctctgctcactgtaacctccacctcccgggctccagcgatcctcccacctcagcctcccaagtggctgggattacaggcgtgcgcaaccaaagattctcattcttagcccattctgttatccctatgagtctgctaatagttgtcatactaggtcaccctgtatttggatcagaaggtacggtaggagcgcctagggtcatataccaggcccaaacagctgagggcagtagagtaaggcctgcaggtcaatgcttcaaggaggggtgggaaggattgagggtgtgggggccagactgtgtagtggcaggaaccccaggtgctgtgtgaagcagagagcatgcatcaccctctgacccacattcagtttcttcctgggtgtctgcaattcccgggactcccaaggaattcaaatgctgcagccttgggcttgcgaattctccaggatgggcagagtatggtcttatttatcctacacttctgcctcatagtgctctcccagtcctcttctgttattagagatcaaaccaggttgctttagggcagtgattctcaaagtgtagtcctgggacaaacagcactggcatcacctggaaacttgttagagatgcaattctcagctgggcgcagtggctcacgcctgtaatcccagcactttgggaggctgaggcgggcggatcacctgaggtcaggagttcgagaccagcctggccaacatggtgaaaccctgtctctactaaaaatacaaaaaattagccgagcgtggtggcaggcgtctgtaatcccagctacctgggaggctgagacaggagaatcacttgaacccgggaggcggaggttgcagtgagccaagattgcgccatcgcactccagcctgggggacaatagcaagacttcgtctcaaaataaataaataaataaataaaaaaggaaatgcaattctctggcctggcccacacatattatatcagaaactgcagtttaacctccccccacccctggagaattctgcttttcgaatcaggcctttctctttttctgtctgtcttaagtctcaacattgagtagctgtgattttggaatagtcagatgtgggacaccctttcttgccaggaagcatctggctcctcagtcagcttagtctgattcttggcctggcccagggaaagaaattcatgttctggattctgagcaatgctctcttgtcccaggtgcctgttgggctcctacttacacctcaaaacatagcttgaacattgtctcttttgtgaactttctgtgactcctaggtcagagaagatggtctacttgtgagtttgcaaagcatgtgtacatgtcctgccaaccattagtgttacaatttcctgactgatctctgcctgagcaagactgggacaaccttgagcgcaaggggggtttggttcctcttacctcagccccagctccttaaacacaatgcctggcacgtggtaggtatttgataaatatttattcaatgaaggaactgcctgcaatggcctggtagacaggaaagcggaatgaaagcaggtcaaaagtggctgggagaagattttctaaatcccgatgttgggcacagggacccctgaagttttcttttggaaccttcctatctgtcttgttctcctctcaccaggcacatccctgccctccagagcccacttagtcacacactacctttcaggactaccttccacatcagccaggtgcaaaccccacaatgacttctgccatggctcccaatgcttggctgcaactctgaggccaatttcagtgagagtaaggagcttatccaatggaagtgtcactaggagtgacaatggctggcttgaagattagggaaatagtgtctacatttcaaaagagaagactgctccacaaggaatgtacagttttgatatgtgcagggctcaggtcttcaggggataaataagttcctaaatgcgccatcaacaggaatttccttcaggataaataggaaaagaacatttaggctttttaattaaaattttattttacatgtttttaaaattcacaatagatattttatcctaaaataaagtaaaaccgagaggtgacagcgtgctggcagtcctcacagccctcgcttgctctccccgcctcctctgcctgggctcctactttggcggcacttgaggagcccttcagccctccgctgcactgtgggagcccctttctgggctggccaaggctggagccctctccttcagcttgcggggaggtgtggagggagaggcgcgagcgggaaccggggctgtgtgccgcgcttgccggccagctggagttccgggtgggcgtgggcttggcgggccccgcactcggagcagccggccagccctgctggcccctggcaatgagggacttagcacccgggccagcagctgcggagggtgtactgggtcccccagcagtgccagcccaccagcgctgcgctcgatttctcaccgagccttagctgccttcccgcggggcagggctggggacctgcagcccgccatgcctaagcctcccacccactccaagggctcctgtgcggcccgagcctcctcgacgagcaccaccccctgctccacggcgcccagtcccattcgaccacccaagggctgaggaatgcaagcgcaccgtgcggcactggtaggcagctccacctgcagccccggtgcgggatccactaagtgaagccagctgggctcctgagtctggtggggacgtggagagtctttatgtctagctcagggattgtaaacacaccaatcagcaccttgtgcctagctcagggtttgtgagtgcaccaatccacactctatctagctgctctggtggggccttggagaacctttatgtctagctcagggattgtaaatacaccaatcggcactctgtatctagctcaaggtttgtaaacacaccaatcagcaccctgtgtttagctcaaggtttgtgaatgcaccaatctacactctgtatctagctgctctggtggggccttggagaacctttgtgtccatactgtgtatctaactaatctgatggggacttggagaacctttgtgtctagctcagggattgcaaacgcaccaatcagcaccctgtcaaaacagaccactcggctctaccaatcagcaggatgtgggtggggccagataagagaataaaagcaggctgcccgagccagcagtggcaacccagtcgggttctcgtccacactgctaaagctttgttctttcgctctgcaataaatcttgctactgctcactctttgggtccatagtgcttttatgagctgtaacactcactgtgaaggtctacagcttcactcctgaagccagcaagaccaaaagcccaccgggagaaacaaacaactccagacgtgccgccttaagagctataacactgaccgcaaagctctgtagcttcactcctgagccagcgagaccacgaacccaccagaaggaaaaaactccggacacgtccgaacatcagaaggaacaaactccagacgcgccaccttaagagctgtaacactcaccgcgagggtccacagtttcattcttgaagtcagtgagatcaagaacccaccaattccggacacaaaacttgcttaattacagaaaatatgaaaagtatataaaagcagggtctcactctgtcgtccaggctggagtgcagtggtgtgatcacggctcactgcaacctcaaactcctggtctcacacgatcctcctgcctcgcctccgaaaactctagttttacagatatgaaccatagcgctagctcttactgtctttcttcaacacgtcctcccatccttccctcctttctccactctgcatttgaccccggtgtattccagcctccaggccaacacacgtgaccacgtctgcctggggcagttgaagtaaaggacgcgaggcggcgctgtcaccgcattctgtgaaccgcagcgctctgggtccctcccgctggtctagtatcatttcagtgaacgtcactctacattttttgtgtgtgtgtgagatggagtctctgtcgcccaggctggagtgcagtggcgcgatctcggctccctgcaagctccgcctcccgcgttcaagccatttttctgcctcagcctccgagtagctgggactacaggcgcctaccaccacacccggctaatttttgtatttctagtagagaaggcttcaccatgttggccaagctggtctcgaactcctgacctcaagtgatccgcccgccatggtctcccaaagtgccgggattacaggcgtgagccaccgcgctcggctgtcactgcagactttgatgggggccacactcggggtataaattaggatcctcactgaaagggcgggaccatggaggctttttcttggccccttagttgtgggttttcctctgggcgcgaagccagtttccatcagaactgcccagaggcgggcgctgccttcctggggtgacgcagcagcaggaagagtttccggatcctggaatccgtgggcggcccgtgggaggggctgaggctcatttctctactcacctgtctccgaatccgccgtggtgtttcaagcgagtcaagattccagatcgcgccccaggctggactcggaattactgccccgcgggtctgcattttcacagcggcaggtgtgagttccccgccgctggagaccagaagcctgaaggcagctccgcccaccccagcccacagcgccgttattccgtttctatatcagtaaacacttgtcattttccgtagaccagggcggggtgacgggtgatcccagtcctcgcagtgaactctggggcgcagaattcaaaacgcttgcggtcgccgagcgcagccccgccctgggttatgtaagtgacagcgctgggccgtttctcttttttttccggaccccgcagtggcgcctaaagtctgcaaggaggaggtcgcctctgtgctgtgagtccaggaatctaaggcgagtgctgagggagaaaatgtagttgatggggcagagcagaaggggctgtaggtgggttggagggggaggggaacgggcagccaggcctggaccctggggagtgactcacccggagccgaagaccatctcagctttccctagcccagaaagggtgggactggctttatttctgcctgccatcacctcaaaatgccgtgggacaaatcttacatattattattgttatttatttatgtattttattttttttgagacagtcttggtctgtcacccagactggagtgcagtggcgccatctgggctcactgcaacccccacccccccgggttcaagcaattcttcctgcctcagcctcccaagtagctgcgattgcaggcaccccccaccacgcccggctgatttttatatttttagtagagacggggttttgccatgttgtccaggctagtctcgaactcctgaccttaggtgatccacccgcctcggcctcccaaagtgctgggattacaggtgtaagccaccgcgcctggccgggaaatatctcttacagaaataaaggcagttggctgggtgtggtggctcacctgtaatcctagcactttgggagggtgaggcaggcagatggtttgagcctaggagtttaagaccagcctgggcaaaatggtgaaaccccttctccaccagaaatacaaaaaattagccaggtgaggtggctcatacctgtagtcccagctactccggaagctgaggtgggaggatcacctgagcctggggaggtcgcggctgcagtgagccatgattaacccacaactgcactccgcctgggtgacagagtgaggccctgtgtcaaaaaataagaaagaaagaagagagagagagaggaagggagggagggaggagttgaggttcagaatatgtaacagtgtttattgctatactccattcaatggactatggactattatgcagtgatttaaaagtaggagtttgggctcacacctgtaatctcagcatttgggaggctgaggtgggcggatcacttgaggtcaggagttcgaaaccagcctggtcaacatggtgaaacctcgtttctactaaaaatacaaaaattaccctggcatggtggcacacgcctgtaatctcagttacttgggaggctgaggcaggagaatcacttgaacttgggagatggaggttgcagtgagctgagattgcatcactgcactccagcctgggggacaagagcaaaactccgtctcaaaaaaaaaaaagatatttcccaccttggattgctgggtcggggggtggtgggtattttcattcataattgtcagattactttcataaacaatggaaacagtttcaggctcctcagcttctcacctccaaaatgggccttttcctgtatcattaacagtcctcaatgttctggctaatcaactgagcgactgtttatagatttgcaggccatttggatttacaattaatcttattaatgaggctgaaatgtgaagtttatctcagcctcaaagaagtaattcagcaaggatcagtggtttcacttaacagtctggctctgaggctggctgtggccctgttatccatggtgagcaccatgggaatgcaggcaagggctgtgagaggcttggaacaaggctccacccaggagagatctgggtgggcgttggtgaccagtagaacctaggtgtcctggccagtgcccttggagactagtcttctttaccccaggcatcttctttattctggaatgagcctgcccatccctcaggaagactgaaaggaattcggtcagaagaatattattgacttttatccagacttgatttcagtagagttctgggacctgccatatcctatgggtgagctctatccaggtccccttccctgaattacctgtcctctccccactgactgggatgacacctaattttacaacctgctgtagcatctttgctcccactgtgacagtaaactccttgagactggtggccatcttgggaagtgattagattcagaagaggttgagaggttggggcccccatgatgggattagtgtccttttaagaaaaagaagagactggagctcccactctcttcaccacgtgaggatatggcaagaaggcagctgtctgccaggcaggaagagggccctcaccaggaactgaatctgctggttccctaacctcagatttccagggtccagaattgtgagaaagaaatgtctgttgttaaccaatccatctgtggtgttttgttatggcagcacaagctgactaaacaagtgccaaaaccaaaccagtaactcccactttctagtctcggacccagtattaaggaattctggtcacatagtttattcatccatttaacaaatatttagtaagtgcttctgtgccaggcatttttctaggcctggtgatcatttaatcaaaagagactaacacctgctccctgatgcttacaatctgaaagacaataaagaaaaatatagtaacagtagtgaattatatggatgtgttccagcaattgattgctgagcaaaaaataatcttaacgcatacaaacgccgggcatggtggctcacgcctgtaattccagcactttgggaggctgaggtgggcagatcacaaggtcaagagttcgagaccagcctggccagcatgatgaaaccctgtttctactaaaaatacaaaaattagctgggcgtggtggtaggtgcctgtaatcccagctgcttgggaggctgaggcaggagaatcgcttgaaaccagaacgtggaggttgcagtgagccaagattgtgccactgcactccagcctgggtgacagagtgagactccatcccccccaaaatatatatatatgtatatatatattataaacaacctttatattatctctcattctgtgggctgattgggctcagctgggcagctcttccgctccatacaacatgggctgggccaccatcatctggagcccagctggtccaacacattcaagaggctcctgcacagggctgcagttggtgctggcttgttggctgggaactcactgaggctgtgaaccaggtgacttggtttctcctccacctgctcctccacgtgccctggctgcttctggctctgcacctggggtccgggtgtttcaagtggccaagtcagaaccacaaggcatcttatgctggaacctcagaagtcaggcagcatcacgttcctcatgttctagtcaccaaagcaagtcccagatccaaaaagggggattagcatcagctcttgatagaggatggcaaggtcacattgctaaagagcatgtgggatgggagatattgttgaggccatctttggaaaaggacttttatgtttacaaagtgataggtgataaaaagaaaaaataggccaggtgcggtggctcacgcctgtaaccccagcacttcgggagaccgagatgggtggatcacgaggtcaagagatcgagaccatcctggccaatatggtgaaactctgtctctacttaaaaatacaaaaattagctgcgtgtggtggcgtgcacctgtagtcccagctaccctggaggctgaggcaggagaatcgcttgaacccaggaggtgaaggttgcagtgagccaatatcgcaccactgccctccagcctggtgacagagcaagactccacctcaaaaaaaagaaaaaaagtaaaaaaaaaaatgcaaagttgacaatcaatgcaaagtaatagaggtggcattttaagtagggtggtcagggtgggcctcatgaaggtgccatttgagcagacttgaagaggagagaaactgagacacgcaggtatgtgcaaaggaagaaccttccagaatcaccctcatgtacacctatgctctgtacatacccagggctctgcactgaggcagaccctaaagctgcagtgggaatggaggtggacacacttatggaaagacttcttcaaagaatgttggggacccaggtctacccttcctgctgtggctcttatacgacctggagttggggagggaaaggcactggcatgtggaggaagactaggagaggaggggaggccaaagcgtgtcccaccctcactccacctctctgctctctgtctcctacatcgagtgcctccttccccagggcttgtggtccctgacaaggaggaccctgagggcaaccacaccttgccatgcagagcacctggcttctcatctgccaagctcactctgacccggctgcaggaagggaaggagccaaccccggactcaagactcaaggggaccagaaccagggagatgagacataccagggctgggcagctgtgggggtccttccagagaggagctgagatacgcctacctggaggggcccctgggcctggaggggctcctcagtgtgactgggtgaagtgttttcagaggaccagggttgaggttgggggcatctcatccagaccctgccggcatctgccccagaacccaagggcccctccttcctccctcctcaatggaaatgctggagatgtcctcagtcaccctctgagcactcacacatcaccccttatttggaaatttttctcactctaaccttccttcctgccgcaccttctgccccatccccaggctctggcctctctctctcctcttctaccctttagcaggtaatgactcagttcccactgaggagccagctgtaggtgagagtttgggctctcggtgaggttgggagaaggaaaaggcttatgggccagggggtgggagggagaatgggcacagccagagcagagtggaagggttgggggaggcgataaagacagatgtttccgtattaccatttttctttcatggtccgagggagctgcccttcccccaagcccaggaaagtgaaaagagaagcaggaacagtaaaatactccacaggaaaagaaaatcttagtgatccctcctgctgtctctttccttttgcctattctggcaaattttgtaagtgaaatttgttaccaagatgtgaaaatcttataagaaagtctctaaatatttgagaataaaattatcaatgtctcagctctgcaggctgaaaaaacggaggctttacaaaataaaatcatgcttggaaaacttctcctctgagggatgtcaaaggctgcactgaataagctctaaggtggtgctgaaatgagtcatttatttgcctgtgtaagctcaggcaggtgttggaattgaggaagtataggtaatgaaaaaagtaaacatgtcctcgggacatagcgactggtgatgaccacacaatcaacacaataaactctagcattcacattgtagtccagctcattcaagcaaagctatctccaatagggagtttaccctgtacagaacacgtgcatttccacctgttctcagactgaccctttgctcatcacaatagtgaaaaaaaacacagccctgggtggagatttaagatgctaatgagtcatgagatgtatgaacaagcatgtacagctactgcacacgtgcacccagaagaccgcccagaacatgcttgctagtaacacctcttcccacccacctcctgtgaataatcatgtaagactcccataaagggagtttctccagcagtgatcaatgctgtctcatccttaggagcagcccaccctgaatcctctcagggtgtacagtttattttgcacttaactttcaaaataatatttttcctttgtaataaattgctttgtacttcatctcctttgctgcgtgtttcttgtttaaattcttttaaatgaagaagtcaagaaccaaggtattacaacagccgtcaacatttccggtgccatgactcagaggtttgtctgcttcgttggtttcagtttcccttcactactggtgagtactatggcagccagagacccctgattgactatcactgctttccccagatctattaaggttttgggggaggaccttttaactcactcacattctttgagcaactaattgtgattgctttccatttggctgctgcttttacagtgtttacaattaccttatttggatggaacgccctgattattcagccttgggacttttgctgcttctgtttcactttttgttttgctgttcctcccaggactgcacctgatctgtacttactggctattgtaacttttttttttttttttttttttttgagacaagagtctcactctgtcacccagactggagtgcagtggctctatctcggctcactgcaacctccacctcctgggctcaagcgattctcctgcctcagcctcccaagtagctgggattacaggcgtgcaccatcacgcccggctaatttttgtattttcaatagagtcggggtctcaccatactggctcagctggtctcgaactcctgaccttatgatcagcccaccttggcctcccaaagtgctgggattacagacatgagccaccgcgcccagcacttgtttgttaatcaagtaatctcttcaaagatttttgttcaccttgagggacacattagatctacttttgccaacagtccccattcctccaggctctgtgtgttctgagactcctctgagtctcagaggagtgtgttctgaacgtctcctctgagaacaggagacgttccaagaggccatccatgttgagtgcaggatgtgtggccacatggatgtgtagtcatggggactataaccaggcattccaagcatgatgactggacattaaaaatggcagatcagtgaaataaggaagggcttgttggtgagacatccaggctccccggctggcagcagagatcacttcagttcagcttggagacgtccagcaccagtgagacctagaatggtgcatggcaaatgcccatgacctcctagggcctcagtttcatggggattcaagggaacaccctggactccatcgtccagcttagctcacagggatgccgatgacctcctggattttggtacatgtttctgtggttgcaggattctcttgttacctagaaagccacctcctctactgtcactgaaacacctctagggtatatactaaacattggaatattttgaaactgtataaattaaaagataataggtgggtgcgatggcttacacctgtaatctcagcactttgcgaggccgaggtgggcagatcacctgaggttgggattttgagaccagcctgaccaacatggagaaaccccatctctacttaaaatacaaaattagctgggcatggcggcacattcctgtaatcccagctactcgggaggctgaggcaggagaattgcttgaaccaggaggcggaggttgcagtaagccgagattatgccattgcactccagcctgggcaacaagagcaaaactccgtctcaaaaaaaaattttttttaaataaatataataaacaattgccaaagagtaaaactattgatacaatcctcaccactttaaggcttaaggttttcttttccatcactgagtctctccctttcctctcattcttccacttacaaatctccaaaacaattctcacgcactgtgactttgctcccttcagctgatttatcagttcatcctgatagcctgataggtgacaagcagaggtgaggacttcaaagttcacaccaagtagatctagttcactgtggccctccttgacaggaggtttgtgaagctggcagggcttccgtccaggctgtgcactgtctgggaatcctcatttgcaatgtctggagatcttcatttttcttactactaacaatcatcttgttatgtttgcacttctttgcatttcaccccttttgaattctgtccttccatgaaaatttattgtcctttttgatccatctgtattcacagactttcatttgctttctttttctctctaacccgtaagactgataaaaattgtcctaaagtttctttctttctgctttgtgtgtcagggctcctctgcctttggtgagagcagagttttatctttaccggaagaaaacttttttttttttttttgagatgaaatctcactctgtcacccaggctggagtgcagtggcccgatctcagctcactgcaacctccacctccctggttcgagcaattcccctgcctcagcctcccgagtagctgggactacaggtgtgtgccaccacgcctggctaatttttttgtatttttagtagagatggggtttcaccatattggccagactgctctggaactcctgacctcaggcaatctgcctgcctcagcctcccaaaatgctgtgattacaggtgtgagccacagtgcccagccctggaagaaaactaattgctgggtgaaatatattttctaccaaattccccttacgagacctagaaagcctaatgaacatagctacttacatgtcctaagctgttattttaaggccaaaattaaaacattaagggcacatataaggttggccattactaacctgaaaaaaaagataaataaatttccatgattaggtcttttcaacactgcatagtcccaaacaatactgttttacaattagagtttttgttgttgttgctgtttttaaataaaaagaaaggaagtttgggtgcagtggctcatgcctgtaatcccagcactttgggaggccaaggcgggcagatcacgaggtcaggaatttgagaccagcctggccaatatggtgaaaccccgtctctactaaaaatacaaaaattagctgggcatggtggcacgtgcctgtagtcccagctactcgggaggctgaggcaggagaatcacttgaacctgggaggcagaggttgcagtgagacaagattcagccactgcactctagcctgggtgacagagagagacgccatctcaaaaaaaaaaaaaaaaaaaaaaaaaaaaaagaggatgatcagggattttccaagggcccaggggaacctgacattattccccctactaaccagacagctctatactaagaccagtcccttagagactgataccaaatctattatgctcatgttattcaaaagaatttgggaggccgggcgcagtggctcacgcctgtaatcccagcactttgggaggccgaggcaggtggatcatgaggtcaggagttcgagaccagcctgaccaacatggtgaaaccccatctctactaaaaatacaaacattagccaggcgtggtggcttgcacctataatcccagctactcaggaggctgaggcaagataatcacttgaacgtggcaggcggaggttgcagtgagccgagatcgcaccactgcactccatcctgggtgacagagcgagactctgtctcaaaaaagaatttggggaaatctaacataattaatgactctataataagaaatataccagctgggtgcaacagtggccctttgggaggccaaggtgggtggatcacttgaggttaggagttcgagaccagcctggccaacatggtgaaaccctgtctctactaaaaataaaaaaattagtcgggtgtggtggcgcaggcctgtaatcccagctacttaggaggctgaggcaggagaatcacttgagtccaggaggcggaggttgcagcgagctgagatcataccactgcactcctgcctgggtgatgagtgagactctgtctcaaaaaaaaaaaaaaaaaaaagaaagaaaaatacctcctaccaacaactttcctcccttacaatctagtccagggttactcttcaaacctcttaagcttctactcctgtagtccttcctcacttgacacacagtcttctgcaccccgtccttatcagcttgttcaccaaacactccctaaagagcccagtcctgctgggacaactcatagcagagtatcctattgcccccctaaaacaaaaagcaacctactctcactctctatctgtatctccctctctcaggtaacacacagaacaacaaccaaatcctcttagagacctacttcatgagtcagtctgtcccagatatcaggaaaaagtcacaaaactagtcataaatccccaagtcccaataaatgaactgctaaacctaacttttggtgtctttaattaccaagacagagtggaaaaggcacatagagatcaaagggaagaaaagagagacaaaagatagtcccaatttttggccttcactcactatgcgaaaactcccacctccaggtcatcctgagtggaacccaagggctattcctgcacttataaaaagcctggacaccggagctaagtaagtaacaaaggccttcaggcttgcaaaccctctggagcctgtcatcaatgtgacaaagaagggcaatggaagaaggactgtctccaactctgaagggaggagggactcctaattccttattgtccctggctaaagactaaagagaccaaaggcaaaaaacagctcctatgtggcaatcagccccagtcacagcaatggagcctcggatgaccctggacatgacaggcaaaaatatcaatatccttttaaagacagaggctggcctgtcagttctcactgtctgccctgggcctctgtctaccaaacacgacactgtcattggtgttaatagcaaactccagactaggattttcactctaccatgcagctgaccaacttctgctgcagtaaaacttaggggtgtaggcctttggtgtgtttatcaaaaataaaaaatgattccttttaagtcatcacagaaacttgaaacaaagactccaagctattcctatgaagcactggaggatctaaggctcctgtccaaaaacagccaagacccaaaacatcaggcaattaatgttgcctcagcataagcttctattcaagaaaacaactcacagtgaaatgtgatgtttttatttttttcttatttatttactgtattttaggcgcttttagtaaaacgaccttatctgctaaagaaataataaatcatactactaatttataaaaattaactcagtcttgctggctttgcatgactaccaaaatttaaaaatgtgcaaaacctgtttctcgggaagaatgggccaacattcctatacacctcctggaacaaactttggaccataatgtggaaatatctgactaaacaaacaatacaaagagagttccttggacctggccactgccagttcaaacttccatttttatctatgaataatagcttcactctgccaaggggaaaattgctttcttaccttgctttttacccagagcaattccccttctgcctttacagcaaccatgccagtttcactccttttatagaaaaactccacaagagagtcagtatatctaaacctttctcacagaatcatttatacacctcatgatagaaccctaaagggggaactttatttcaaaaagcttattaacaccactcaactctaccatcctctaattagtccagtgaccaccaaatttccattacttttaccacctcgatgcaaaatgcttttgcagcacaaatttcaccatcacatataatttgcttgtgttggccgggcgcagtggctcacgcctgtaatcccagcactttgggaggctgaggcgggtggatcacgaggtcaggaaattgagacaatcctggccaacatggtgaaaccctgtctctactaaaaatacaaaaattagctagatatggtggcatgtgcctgtaatcccagctactcaggaggctgaggcaggagaatcgcttgaaccagggagtcggaggttgcaatgagctgagatcgcactactgtactccagcctggcgacagagtgagactgtctcaaaaaaaaaaaaaaaaaaaaaagaatttgttggtatttgtggatcttcagcacgtctacaactccctccacaatggaagggacgatgtcccatagtttacatttccccttatctaccttttgcattggctaacaaatctctccctttccccatgtaccaacatcacaagatccaccgctgagcaggattccttgttcccttgggattagtgctatcctctctatcgggactagcagagccagccacagagacagagccttgggaacccagcataaactgtctcaggagaccagagtggccctctgacaaacagcagagagcctcactagacttcagcaacagctggacttcctggcagtcctacaaaaccgaagagccttagaccttctcacagttggacaacgaggaacatgtttgtatctagaagaagaatgttgttttcgcatcaatcaaattacaaatatatattaatagcattttcttggaataagaaaatcattacccaggcagacaaaattgaatatttaggagcttccgtgggaacttggaagcaatggctgttttctgccttgctccctttaacaatgccagtcattaccatatgtttagctctaacttttggtccaactttgtttaaaatgctgatttcccagcctggccaacatgtcgaaacactgtctctactaaaaatacaaaaaattagccaggtgtggtggcaggcgtctgtaatctcagctacttgggaggctgaagcaagagaattacttgaacctgggaggcagaggttgcagtgagctgagagctgagatcactccattgcactccagcctgggcatcagagccagactgtctcaaaaaaaaaaaaaattgctgatttcttgctttgtcacctacagcaaatcccggttcatgtgatggttttgcaaggcttccaacctttggctgctaatgagctatctcacatcttgcccaccagtcccctgaaagacatggcttacacactgttagactaggcaggaaaagacttcagggcccaggttaggcaaggacaatgccgcactcagcaggaagcagctctggaagaaatgacctagcctctcatcctcccgtatgattatgggtcctaagatcttttagggaggaattgaggcaggatagggagtcaaggaagtaactgtgtccttgggatgcagcaacagtgataaccatacagtcaacacaataagctccagcattcacattgtagaccagctcattcaagcaaagctatctccagtagggaatttaccctgtagagagcatgcgcattttgattttacctaccgtcaaactgacccttagctcattacaatagtaagaaacacacacctgggtggagatttaagatgcttatgagacataagatgcatgaacaagcatgtatagctactgcacatgtgcatccagaggaccacccacccagaggaccacccagaacatgctgactagtaacacctcttcccacctccttatgaataatcatgtaagacccccataaagggagtttctgcagcaataatcaatgctgtctcatccttaggagcagcccaccctgaatcctctctctcagggcatactatctattctgcacttaactttcaaaatatcatttttcctttgcaataaattgctctgtactgcatctcctttgctgtgtgtcccttgtttacattcttttaaatgaagaagacaaagacagaggtatcacagatgtcatcaacagaacctctatgtcctccttaggaaagtgaaatgagcacccaatgcccagattttggttataatacatcaatctccaatagaaggaaccagggctccttagaaaaatagctgattctaggggtgaagtaggaaaaatacaagataagcctggaacatcttgaaatgctacaaaagaactgggcatggtggctcacgcctgtaatcccagcactttgggaggctgaggcaggcgaatcacaaggtcaggaattcgagaccagcctggtcaacatggtgaaaccccatctctactaaaaatacaaaaaattagccaggcgtagtggtgggcacctgtaatctcagctactcgggaggctgaggcaggagaatagcttgaacctgggatgcaagaccaggaagactcaatattgttaatatgtcatttcttcccaacctgatctatagaatcaatgcaatcccagtcaaaaccccaggacgttattttgtgtatactcacaagctgatttaaaaatttatatggagaggccgggcacagtggctcatgcctgtaatcccagcactttgggaggccgaggtgggcagatgacctgaggtcaggagttcaagaccagcctcgccaacatggtgaaaccccgtctctactaaaaatacaaaaattagctgggtgtggtggcgggtgcctgtaatcccagctacttgggaggctgaggcaggagaatcgcttgaacccaggaggtggaggttgcagtgagctgagattgcactccagcctgggcaacaggagcgaaactctgtctcaaaaaaacaaaaaacaaacaaacaaaaaaggtttatatggagaggcaaaaggcctagccagcacaatatagaaggaaaacaaagtcaaagtactgccacacctgacttcaagactttctataaaactgcagtaatccagacagataattggtatagtcattgctggaaggagtatgaaggttcctcaaaaaattaaaatatagaactaccatatgatccagcaatcctaccactgaatatatattcaaaggatataaaatctgtgtgtcaaagagatgtctgcacttccatgttcattgcagcattattctttcttctttctttagagttagggtgtcactgcattgcccagcttggtctcagaatcctggccttaagtggtcatcttgcctcagcctcctgagtagctggattccatgtgcgagccaccacacctggctgcagtgttattctcaagagccaagatatggaatcaacctaagtatccattaatggatgaatgtataaagaaaatgtggtatatatacacagtgggatactattcagtcaacaacatgaatgaacctagaagacattatgttaagtgaaataagccaggcgcaaaaagacaaacatgatctcacatatatgtggaatgtaaaaaaagccaaactcatatacatggtgagtaaaccggtagttgtcagaggctgggaggtgggaggattggggaggggtaagcaaatgacacaaaatttcttttctttctttctttttttttttttaaagacagagtctcggctgggcgcagtggctcaagcctgtaatcctagcactttgggaggccgaggcaggcaaattgcctgagctcaggagttagagactagcctgggcaacatggtgaaaccctgtctctactaaaatacaaaagaaattagccgggtgtcgtggcatgcgcctgtagtcccagctactcgggaggctgagacaggagaattgcttgaacccgggaggtggaagttgcagtgagctgagattgcaccactgaaccactgaactccagcctgggcaacagagagagactctaccaaaaaaaaaaaaaaaaaaaaaaaaagacaagagtctctctctgtcacccagtctggagtgcagtggcatgatcttggctcattgcagtctctgaatcactcgggttcaagtgattcttgtgcctcaacctcccaagtagctgggactatatgcatgtgacaccacatccagctaatttttgtatttttagtttcaccatgttgaccagtctggtctcgaactcctgacctcaagtgaaccacccgcctcggcctcccaaagtgctgggattacaggcatgagccatcatgcccgaccaacacaaaatttcaattagataggaagaataagtttaagagatctattgtactttatggtgattaaacttagtaaccacatattgtatatttcaaaattataagataaattatttgaagcattattaccacaaaaagtatgtgaggtaatgtatatgttaatggcttgctttagccattttacaatgtatacgtatatgaaaacatgatgctatacacccaaatataacttttatttgtcaaccaaaataatttaatttaaaaaagacagtgttgtattggcaaaagaatagacaaatagatcaatgaaacagaatagagaaccaagaaatagacccacgtaaatacagataaaggagcaaagacaatacagtggagaaaagactgtcttttcaataaatggcactggaaaaactggacatccacatgcaagaaaagtgaaatgaaaagagctctcttgaaaggttgttgtgaaggtcatctgtgacaggaacaaaaagtgcccagcagggtctctgacagcaagctcctacattaatctaatggctggacttcaatagccttagccccgtctccataaaactttgctatgaaggctacaatgattcctgtcagtcatgcagtcctactaacctgctgggtaggatacaatatcgaaggggccagtatactgccctcagggggctctgtggcctcttgaccttgtggatgatgctgaccataatgttctgcttgtccctggctgaagacaggcccctcctgcagaggccaggcatgaatgcacatctgagtaagactctattatgactcaagaataacaaacataaataaataaacatgataacataacaaactaggtttcattttctgctgctgtaacagaataccacagactgggcaatttattaaaatatgtatttcttacagttctggaggctgggaagtccaagagcatggtatcagcatcttgtgggggccttcctgtagtgtcatcccatggtgaaagaggtagggcaaaggggccaaacatactttttatcaggagcccactcccacaataatgacattaatctattcaacctaatcaactcttaaaggtctcccctcttaatactatcagaatagcaattaaatgtcaacatgagttttggggggtcattcaaactgtcagaggcatgtgaaccagagcaactccatcttgaataggggctgagtaaaataaggctgaaccctactgggccacattcccagacggttaaggcattctaagtcataggatgagacagaaggtcagcacaagatacaggtcctaaagaccttgctgataaaatgggttgcagtaaagaagctagccaaaacccaccaaaaccaagatggtgatgagagtgacctctggtcgtcctcactgctacactcccaccagcaccatgacagtttacaaatgctgtggcaacgacaggaagttactctatatggtctaaaaagggaaggcataaataacccaccccttgtttagcatatcatcaagaaataaccataaagatgggcaaccagcagccctcaggggtgctctgttgatggagtagccattcttttgttcttttacttttctaataaacttggtttactttactctatggacttgccctgaattcttccttgtgcaagatccaagagccctctcttggggtctgaatcaagactcctttcctgtaacaaaaccttagcattaggtaatctgtggtttacttttttttttttttttttttgagacagagtttctactcttattgcccaggctagagtgcaatggcacgatcttggctcaacgcaacctccacctccagggttcaagcgattctccagcctcagcttaccgagtagctgggattacaggcatgtgccaccatgcctggctaattttgtatttttggtagagatggggtttctccatgttggtcaggctggtcccaacctcaggtgatcctcctgccttggcttcccaaagtgctgggattacaggagtcagccaccgagcctggcctggtttatgtatatttatctttattcctacatttccatgattatgagattcacagttcatccaatagacttgaactgacccaatgcccagcactttcttaagttcttacagatgaacaaagctaatattcacagattctatttatttatggcttaggactacctactgtaaattactgggggccagtccattttggagttcataacctaaagcagaaactcaggtggctaatatgttactttcatgaaggattgttatgagtgtatcatttcaattgtcttgcagaagcctcatttgttctgttagatacagtaagttcctcttcaaaggttcagcttcttcaacttccttgttctttgttttctatttctaaaacccaacttccttgtactctcttgttcctagttacccgctctgtaaacaccaactcccaccagttccaatctgtaacttgcagagggctcttcctgcctttgccatgccctgacatgttttgcacagtaaaggatggcctctctcttctcgctgaaacagcccttcccgccctacttactcacactcctgctccatttgaaatagccaattgggatcagcttagattgtgcagtctgacttcagcaaatggggacaggacacagtagcaggggctgattgcgttagggataaaacccgcttctgtccattgttcggtgtgctctcacagcagccagaagtgcaagcagcacccttctgcagaagtaaacttgccttgctgagaaatgcttttgtttgagtgcttgtcttctttgcgactccaagctcttgtttttttttttctaaatagctgctatctttttgtttttgtttttgtttttgttttttttgagatggggtctcaccttgttgcccaggctggagtgcaatggtgtgatctcagctcattgcaaccttggcctcctgggttcaagtgattctcctgcctcagtctcccgagtagctgggattacaggtgtgtgccaccatgcctggctaattttttgtatctttagtacagatggggtttctccatgttggccaggctggtcttgaactcctgacctcatgatctgcctgccttggcctcccaaagtgctgtgattacaggcatgagccaatgtgcccagcctctttttttttttttttttttgagacggagtttcactctgttgtccaggctggagtgcagtggtgtgatcttggctcactgcaacctctgcctcctgcctcagcctcccgagtagctgggatgacaggtgcctgccaccatgcctggccaatttttgtatttttagtaaagacagggttttgccatgttggcaaggctggtctcctgacctcaggtgattcacccacctcggcctcccaaagtgctaggattacaggcatgagccactgcacctggccccttgtttttaatttacaaatgtaattaatttagctttgtaaaccaaaaagtgactgaggcagatctcaatcaattcggtgttcattttgccaaggttgaaaatatgctgggggaaaagaaacataagccacaataggacctgtgacctgtgctttttccaaggaggattttgggaccttcaatatttaaaggagaaagggcaagcaggagaggaaagaaaaaaaaaggaaggacaggtaggcaatgatgcgagtggttacatacttgtgaggctgtgattagtccttagtgaatcacattttacatgtgaaaagaagggagggaggaagaagtcagttatgcattcacatcatgttcagtaaatctatattttacataagctaaagtaagcatgtaaaattacagttatatgtttgggaacaaaaggaaggcaaattttgcatgactcagtttccaagcttaatttcttgcatagcagtttggggtcctgagattctattttcttttcacatttctcccttgttattcaaaatctttcagagaaagcatggtagaagaaaatgggtgtctgctcatgggtttagtctaacctcttctgctagaatgatttattcctggaagattagatcccatgttgctaggaaggcttattcttaggggcttgtaaagtctcttgtcccatggagaaaaatagagggaggaagagagaaagaaaaaagggaaagagagaaagaaaaaagggaaaaagagaaacaaaagggagggaccaagaccagattatagaaacaaagggaatgcaatcctggaaaagtaatttaggatatgctaccgagaagtccatacttcagtaggcaggcacaaaggtggggtgtgtgaggctctgattagtgctcagtgaatctacattttataggtgaaaagaagggagtagagaaaaaatctattatgcatttgtcttgcacttagtaagtctacattgtacataagaaaaagtaagcttgtgaaaatacagttatctgcaaatgctactatttctgctattacgctacaaagtttaaattttctagcttcagtttgcagggctgtaagaaaagcacagttttaatttctagtgattccaagtgagaaaaatgggagaaatttttcttttgaaaatgttactttggagacttatagccagggaagaattcaggatctagtctgaataaattgtagacaaatagtgaaaactgaaaaacaatggacaaggctagaatcttataatgagtatactataattttctttgaaataatttttctctctccagtcccctatttttaccaaaatcaaaatcatagtgggaccaacgtatctgcaaaataagttttagtcttattatacttggtctgattatttgcataaagcgcagcaagaataattattggccaataggctcttttttttttttgagacagagtttccactcttgttgcccatgctgagtgcaatggtgcaatctcagctcactgcaacctctgcctcccgggttcaagcgagtctcctgcctcaacctcccgagtagctgggattacaggcatgcgccaccaagcccagctaattttgtatttttagtcaggacggggttactccatgtttgtcaagctggtctcgaactcccaacctcaggtgatccatccgcctcggcttcccaaagttctgggattacaggcctgagccactgtgcatggccctaggctctttttgaattggttttgctagagcttttcataaggaatctcagattagagtttttcttgagtccagccaaggatttatctgtgcctgcagatacttgtatgaatgaggtaaatttctgtcttctcaaggtctcaaaataacgtgtggttcttaggtctgtgagaaagtgatattcttacttactacctgtcaggaaccctgtaaaggaaatgcgtagacaaagtatgaggtcagtttttccaagggttttttttttttttaatcagttctataacatcaatctcaagttctcaaagcagtctgcttatatcttaaaatatggcattctagccaaagccttggtaaaataatcagtgtcaaaattatgtcctgttaagaaagaaaacagatttttattaaactcatgcaactaagtatattgccataaatcatgaatactcagaaataaggccaggcgtggtggctcatgcctgtaatcccagcactttgggaggctgaggcaggcagatcatgaggtcaggagatcgagaccagcctgaccaacatggtgaaaccctgtctctactaaaaatacaaaaattagccaggcgtggtggcgggtgcctgtaattccagctactcaggaggctgagacaggagaatcacttgaacccgggaagcagacattgcagtgagctgagatcgccccactgcactccagcctgggagatagagcaagactccttctcaaaaaacaaacaaacaaacaaaatctcagaaatagtttctgaattctggagaaatcaggtagagagaaagaaatatgcctcaaattttgcttacaagagtacgcttcattgtgaaaagctgtaaatgttcaaaagaaaagttttcttgactctgaaaaacaaagcaaaaagaatcagcaatgtttccaacaaaaaaagttataaaagattattttggccaggcgtggtggctcacctgtaatcccagcactttgggaggccaaggcgggtggatcagaaggtcaggagtttcagaccagcttggccaacatggtgaaaccccatctctactaaaaatacaaaaaattagctgagcgtggtggtgcacatctgtagtcccagctacttgggaggctgaggcaggagaatcacttgaacccagcaggtggaggttgatggtgagctgagatcatgccactgcactccagcctgggcaacagagcgagactccatctcaaaataaataaaataaaataaaataaacccctctaactaggcagaattacttttcctttaacaaaagccctatttccatgccttcttatgtttctaccaaaaaccacattctacttttctttgcatgttgcttgtagaattatttatcttatatctagtaatttaaattacatctatgaattgtaatgttaactcttagtaactcttatttttagtgaaaaaactaggaggtacacaattttaattagtacctcctgcagaacgcaatctcggctcactgcaacctccgcctcccaggttcaagcgattctcctgcctcagtctcccaagtagctgggactacaggtgtgtgccactacgcccggctacttttttttatttttagcagagatggagtttcaccatgttacccaggacggtctcaatctcctgaccttgtgatccgcccgccttggcctctgaaagtgctgggattacaggcgtgagccaccgtgcccggtctatcataggatcttataaggagatcaactgcatttagataggtgcttttaatttggcctgtatcttttaactggaccattgaactcagggtagagcccacactgaattttcagtgcccagaaagagagtaatgccatggggacctggccatacaatatttttagtgtgttttgctacaaaaactttctctcaaggctggtgggcaacccagtgccaatcagcccactctgtgatcagcccatttcccagccattgtatacgccaaagtcaagttttctcacaatataaagtgatttctgatcccattcaaagccaaaatcaggtcatgcaaggcaaaggaacagagtttttgacctgagaggattttgtcctctcttggattccctcttgggattccctgaggaaaaaacagcagtttctcacaaaaatgcgtctgtggtgccttttgcatttttcttaagggatcccaggctattagaattttatttaatttaatttttttcttatgtggcaccaaggttggcaagaggaaggaggggctgatagaaataaataggggaggccgggcgcagtggctcatgcctgtaatcccagtactttggggggccgaggtgggtggatcactaggtcaggagttcgagatcagcctcgccaatatagtgaaaccccgtctctactaaaaatacaaaaattagctgggtgtggtggcaggcgcctgtagtcccagctacttgggaggctgaggtgggagaatcgcttgaacctgggaggtggaggttgcagtgagctgagaccacgccattgcactccagcctgggtgacagagtgagactccgtctcaaaaaaaaaaaaaaaaaaaaaacaaagaaatagggaaacagaggaagtgcatgtggctagcagggggttgaaaaagagagacatttagttgactgagaaatgtttacccagggagaaaagagaccttaaagcaatatgtacacactgaagtctaaaatatcagttttaattaagtcaaattttgactatagagctctaaaaaaatcctttgacatctcttattaccagattttagccaggaggaacagttgatattcctggcttttcaccttctttaccaaaaggtatcctcccaagtgccttaaccaaagttatgactattaggccacaaggtgggtggcccttagttgttccctgatgaggtggcaaacctgagccatggcagaagtgtttaatgtttttttttttagttttgctctgttgcccaggctggagcacagtggtgtgatctcggctcactgcagcctccgcctctcaggttcaagcgattctcctgcctcagcctcctgagtagctgggactacaggtgcccaccaccacacccgactaatttttgtatttttagtagagacagggtttcaccatgttggccaggatggtctcaatctcttgacctcgtgatccgcccacctcggcctcccaaagtgctgggattacaggcatgagccaccgcacccggctgagaagtgtttaattttaactaccagaagtgtttgaagtgatttttttgctcttaatttagtcaagggaatttttgaagactagccatgacactactatgtgtccttttaagacttgatgtttccattaattgtttagaataagaaatctctgaaatctttaatagcccacagagagaggctgggaaggtgttcctgttatataaatgaaacctctcaggtagtcaaattttatctttttttaaccagctgggggttttacaggtgcaacctgactttctgcagctgtgggctttccagtatagctcctgggccagggatctctatctgctccccagaggcttgtacctaagatacagggctccctgggcttctcagtacaggtggacttaaactaatgggctagaaacagagaaagggaggtagaatttcccacttacagccagaccctgcagcacagctttccagagcctcagcccccctgccctggctgatgctccctccctgactcccctcaccagggccctggccccaccacacagctgagctggcccaagccaaagagttgctggagcagcagctggagtggatcaggctctgctggagggggtggggggcccaggccctgatggtcaagatccagaacctgaagaaacagataaggaaggaggcaccaagagagcctgggaggagacacccaagcttcccaccagtgcctgtggcacccctcagcattggaaatactgtgcaccacccccaggaaccccaggatcagaaatatcccagctgctcccaggccactgggaaaatggaagagaccacaaaaggccagaagttagcagtgtgatggttaatactgagtgtcaacttggttggattgaaggacgcaaaatactgatcctgggcatgtctgtgagggtgttgccaaaggagattaacatttgagtcagtggactgggaaaggcagacccaccctaaatctgggtgggcaccatctaatcagctgctagcgtggccagaatataaagcagggagaaaaatgtgaaaaggctagactggcctcccagcctacatctttctcccatactggatgcttcctgccctcgaacatcgaactccaagttcttccgctttgggactcggactggcttccttgctcctcagcttgcaggcgacctattgtgggaccatgtgatcatgcgagttaatactacttaataaatccccctttatatatatatttattctgttagttctagagaaccctgactaatacaggcaggtagtggggagccagggctctgcagtctcagtcccatgcctcctttgacctcacagcagtgcacctcagccttacaggaatttaccctggatcatgtcctacaataacctctccccaaacacagtaagaagatgtagcatgcagataccacagacacacatgtgttccatttttcattaggattttttttttttttttgagatggagtttccctcttgttgaccaggctggagtgcaaaggtgcgatctcggctcactgcaacctctgcctcctgggttcaagcgattcttgagcctcagcctctcgagtagctgggattacaggcgctcgtcatcacgcccggttatttttgtatttgtagtagacgctgggtttctccatattggtcaggctggtcttgaacttctgacttcaggtgatccacccgcctcgacctcccaaagtgcagggattatatgcgtgagccaccgcgcccagcctagttaggatttttaaaattctgacaatcaggaatgggggttcaggagtggtgctgatgcagaggagggaagccatggggtgggggctgttaggggtggaggcagtagtgtctccttcacccccaccctggggtcttctcctgaaggacagactatcacatcccagaattggtgagtcctctactgtgtctgttcaactgaagagaaaatatggcacagtcagaataaggcatgaaaaggggaaagtgaggcatgaacacacggcacacatgcagacgctggtgtactgtgtgggttcagaggacggacgtgggggtgagggaagggatgtaatatgatgagagaagacagaaaccccacataaaggtcaggaaaacatcccaacacagcatcaaaggccagggggcatgaaccagtcaagtgtccattatgcatcagatgcccatgacctatgtgatgagattgaagaaaaacatactaaggttcagggaggaactaagtgtttcatgagatcagcactcaccgtggaggagacatctgtctcatcaggcagctcactaacactgacctcgaagcgatgctgcccatcacactggatccttgcatgattctcatctgacacaaacgctgatggccaagccctgttccaaaccagcctgctctagtcacctgaaaggaggcagagggtagaaacagaagacccaaagagggaagacacccagagggagggaagaggatgtaaggtgtgaaaagatagaaaacataaggaatgggagagtaggtgtccttctgggtgtggggctcacctgtcattgataaaggcaatgctcatccacttgatgtctatgacgtggcccaataggttggtaaccatagaactggtcattgaaaatcttttggggtcattcttggacatgtgcagaacagcaaacaattttagtcacctgatgtgtttccttggcttcctgttcagttttccttaggcctcagctgctgctattgctgctggctgctctccacattctcctaaattccagatgggtgtgaggaggtaagggcgggaagaaatagtggattgtggattgaggtgcgatttcccaccactggaggggacagattcataagctggcattgaagaggttcctgccctttgcacagtgtgtttggtcaccccagtgctcaggctgaaccctgagaagaaagaggaacttgactgtctgaaggctcttgggtggtgtttaagacccctggccactgtgtcctggctgaatgcatacatgcagatggaatctctttctttctttttttttttgagacggagtctcgctctgtctccaaggctggagtgcagtggcgcaatcttggctcactgcaagctccgcctcctgggttcacgccattctcctgcctcagcctcctgagtagctgggactacaggcacccgccaccacacccggctaattttttgtatttttagtagagacagggtttcactgtgttagaatggtctcgatctcctgacctggcgatccgcctgcctcggcctcccaaagtgctgggattacaggcatgatccattgcacctggcctcgatatagaagtttttaagagccagacgcttgaacttgtgggcatcggtttggggaaagagtcagttggagtaaagttatcttgaggcattaacttttttgcttcttaaggccattggtcttttatgctagtctttctacaaacataacatgaggaaacgcctaggctggcagcaatgttttcagccagctgaacaaataggtttttggctaaaggaggaggctctgataacttccggtttatatgctcaaagaatgacttaaagactcagaattgctcctgggctgactgcttggttcaagtcttctttataatatacaaagttgttttagctttttgaccgtagctttgtaatgccatggagtagcctatagtccatacaggtaggtttggccttaagatagtaagatttacaggattgcaaatgcttgtcttacaatctggttttgctggtactttgatgagcaagattggctttggcctcagtgatgatcggtcagtgaactgcattgtgcagttccagcaagctattgctagggccttggagggacaaacagggagtgtacatacaattttatactggcagtttttatagtactttgtaggactagagattgtgagataggttgggttcatggatgttaactgacaaatatcaaagtatatggatatagcccccaccctgggaaggagaggcttgggtttgacttacaagacttcttttttttttttttacttgtatgaatcttaaactaagtcctaggtaaagacttcggtcatagcatatataaggctggccatttcttgggtcacaaattgaacaggtggtctgattataagtacaagttcttttttttttttttgagacggagtctcgctctgtctccaaggctggagtgcagtggcgcaatcttggctcactgcaagctccgcctcccgggttcacgccattctcctgcctcagcctcccgagtagctgggactataggagcccaccaccacgcccggctaattttttttttttatttttagtagagacggggtttcaccatgttagccaggatggtctcgatctcctgaccttgtgatccacccgcctcggcctcccaaagtgctgggattacaggcgtgagccaccgcgcccagccttataagtacaagttcttaagcgagtctttgtacacttataagtatggtacaacagagttctagttatactgttctttgactaagtagtatgtgtacagtggggacacttttctgtcagtgtttcttctagtatggttaagggggtaacaacatcaaaacaatgtacagcatatttaaatctagcaaggacaaaagaggtctttatttgggggaggaggttgagcacagtgacagaacaataggaaaacagttagtattacaggaaaactactagtcttaagatttctaactacatttacttgcttgatgagtctttaagcttcagccgtgcatagactagtcagcttccggtgtgtgactagagcaaggcttgttgtttcttcaaacttcagctgtgcgtagactggtcagccaccggagtgaccagagcagggctgtcgtcttcagcagcagcttggtcttgtctcaggatcagccgggttggatgatctgggtgttgctggctggttcacttgtcctgagctgccgattttagccgactgtgatggagttaaggcacgattcttgcaactttaacagcagtgggagtggacaagattactctgtggggcttatcttacatgggtcttagagaagttgggttctactttttaacttaaacaaagctactaggtttaaagggtttactgggtctgttagacttctaggcattcttttatgtacttaactatgaacactttgcatggctgtttctaaagcctgcatttgatttcttaaggttagttcttttagttcttggagatcacttttaatttgacggtggctgattgaacaaaatcttatagggtaaatacttagtttgtttggtgggggtgcgcttggctcagaggaggactataggcaagacttgattctgtctcagatgagtttcttggcaatatttcttcagtagctgcttgagtgtctggttcatgcattctacagtaaaataatctttttttctctttttttccttcaactttgctctagaaaaaagaagtgtccaaggcctatttttttagccctagctattcagacagtgttatcttataactgtccttgggttgggcacagtggctcacgcctgtaatcccagcactttgggaggccgaggtgggcagatcacgaggtcaggagatcgagaccatcctggctaacatggtgaaaccctgtctctactaaaaatacaaaaaattacccaggtgtggtggtgggtgcctgtagtcccagctactcgggaggctgaggcgggagaatgacgtgaacctgggaggcagagcttgcagtgagccgagatcgtgtcatggcactccagcctgggtgacaaagcgagacaccatctaaaaaaaaatatatgtataaaactgtccttgaggtaagcttgctaagcagaaaaaaacttgttcttttctttttctttttaacttttgccttgccacattctaagccttagctttaacttttcttaaagtaagtaaatgtaatacttattattattattattatttttaaatttctgcctcagaatgaataaattacatgtatttttttttttgaagccatgcctttggattagggcagactctaggatatttaagtgaattccctgaggaatgtggacactgtaagcaggtgagtgcattattctctgcttctctctccccacagggccgtcgttcaccctcctccaccttgtcccctgcactgggaggcaaccacaacaggcacggcccatgctcctgcaccacctggcttctgcttgggtgtggatgataacaggcacctgcaggagatgggagcatgcggggagaagtaactcagggttttcatttccctcaccccctctggacagctctgtggttccgtaatcattgccgtcctctacctacagccacaggcatgtgggtctgcccctagtgaaagctacagatttccttgggttctggaaactgctccgttcgttgctctttcaagcttcaagatgaaaacagtttcctgccaggaataatcccagggagcttcagcgccctttgtggctttcttagccctgccggcacctgtgtagaaggtgccatctcaggccagcgcggtggctcaaacgtgtaatctcagcaccttgagaggccgaggccggaggatcacctgagattgggagttcaagaccagcctgaccaacatggagaaaccctgtctctactaaaaataaaaaattagctgggcatggtggcgcatgcctgtaatcccagctactcgggaggctgaggcaggagaattgcttgaacccaggaggcagaggttgtggtgagccgagatcacaccattgcactccagcctgggcaacaagagtgaaactcagtcttggaaaaaaaaaaaggtgccatctctttcctgccaggtccctgactgaccacagggtgctcccacaaaaggagaagtgacaagaatgtatttaagacattgcactaacacatctattcatgatgttaattcaaaaaattgacttactacaataaaagggaaaaataagagtattctggaaacagagcaagaaggaaggcaaaggtgaaaacaatcaatttggggcatctgagaagccccaagtgcagaggctgccctgagtctttagaggacaagaaacagaacacacgacccaaaagtgagagacagagcctggccggagcaggatgataacggctctcctacagagtactattcctgtaaatctctgacgagaggggtgagatcaacatgtaaaaatacacacacacaaagtggagctgagggcaggatggagaactgtcattctcagcccgtgacctccatggacttggagaaagactcagcctggagatgtgtgaggcctccgacctggagcagcacccgcccctaaagaccaggcacaaatcccagcacacggagggatccagacaaatacacaagaaatgaccacagcaggaactttattgagcacggagcaaggttgcacaccactcagcacctgcccctccacctgcccttctctccccacctgcctctgccccagcacagcaggtcctcagaatccaaaaagagaacctaacctgcatgttctctctctctctttctttctttttttttttttttgagacagagtttatctcttgttgccaggctggagtgcaatggcgtgatttcggctcactgcaacctccacctcctggttcaagcaattctcttgcctcagcatcccgagtagctgggattacaggcagctgccaccacacccagctaatttgtgtatttttagagatggggttttcaccatgttagccaggctggtctcgaactcctgacctcaggtgatctgcctatcttggcttcccaaagtgctgggattacaggcgtgagccaccacgcctagcctccatgttctcttaatagtttgtaatatcttatcacagcttcaaagaaaggatatgagaataataactcatagagcaagatatctatttagagggagtgagtcacaggggagatctgggagggaaacactgcaactctttcattcccagaaaaagattgatccagggaaggggacaccgggcctggatattgggattatgtggaaggggttctgggacatcaggggaatgggcccctctccctatatccttcctgggctatgcttgggaggagacacagtttatcagctgtgcagctgggggaagagaagtcagggtccagagacaaggggagctgagaacaatctgtgtcttgctggtctgcagaaggcagctctcaaactgtggagaacagtttgggatgatgaaaatgttctaaaattagatatggtgatttaaaaatccaaatatgtgaaaaaccattgaattgtatactttaaatgggtgaatgatatgtgaattatatcttaagaaagtttaaggaaagaaatataatgatgtgtcatgacaaatccactagaatttctaaattaaaatcactgactattccaaatgttggtgcgaatatggaccatcaagagctgtcacacactttgtctagcagtgtggcatcatctttttgggtgggatatcatatacatacaccagtaattccactcttaggcatataattttgaaagatatatgctcattgtgccaacatacatgtgcaagaaggcttacaacagcattgtttataatttttaaaacctgaaaacaaataaaatgaccacaaacaaagaaggattaatttaatgtgtggaattctatgaataataaacatgaacgctctagagacacctataacaacttagcaaacatacatttgagctaaaataaggtctcataagaatacacatagcacgattccatttgtatcaaaagattcaaaatctatatgaagtttgagataacctatattgttttagagatgtatgcatgggagtaaagctttaaagaaaggcgtgaacaggattactatgaaatcaggatgagggtgaactctcatgacagcaaagggattgttattgctatcaggattggtatggaaacttctgtgtgttttttttcctgacttttgtttctttttcacatggattttccctttaaaaccatttgttaaaatgtaaatataattcaggcacttcacttttggttgtaacttacactgtaagactgctaaaaaaaaataatattagctacttacgtgtaattggaaaaattaacctttattcacaaaagagatgggctgccccctacaccacgaatcagagaagagaccatgaattgaaatgggaacttggaattgtcattattccgtaattatactcaggatcctgtccatgaaacattggaataccactgtccaacccccttctgcagtgatggagtgtctatatctgagctattcattatggcacagatacagacattcatattctgtgaattctgagtacttgaaatatatggctggtgcaaataagaaactggcttttaaaatccatttaattttaattaattaaagtgtaaatagtgccatgtggacaaggcagaattacagtgccgagaccagctcagtcagggagaccctaacccagtggcgctagaggaattaaagacacacacacagaaatatggcgtgtggggtgggaaatgaggagtctcacagccttcattccagtaaacagtcattgtgaccagttgtcccgctttcctcaggttttcttccaccatctgtgacagcttcttgatctgtccccaggtgggtggctgtgttcaacgggtgttgctcgtgacagttagggtcctcctcagcatcagtcttgacatggctgcaaccagggggtcctcgggatcctcctggaatctcttccttggcatctggctcatgataaggttttaggtgtcttgatagtatccaaattggctgctggttttggcctggagaaacacaagcataacctctacccaagttattattttacctatgtcccaactttttgttattggatctcttcaccaaaccagttgttctgctcctgtctttgcagctggtttctgtagatgctgttcagctgctgataacatctggcctttgggcagcctcaaaaaatttaaagttaataatgctagattcagttgtgtatgggctgtctcgtaatccctgtttctcccccttttttgtttttgtcatcagttgttcatctgtataaatcataactgagcattttcaattaactgcgtggaatgaaccatgtataaagaatcagaaatcacattaacaggcatatcaaaagcagtcagcacctcaattacagctacaagctctgctttctgagctgaagtataggttgcctggaaagctttaccttttgatccagaataagaagctttaccattgctagacccatctgtgaaataatgaaaatgcttagcaggctgcagattgtttaccacaggaattgtaaatgcaaaccgttcactgtcttgcttagctaagggtatagtaaagaaagagtccttcctggctgtaatgctcctatagcttgtataactgaattaatggctcctaaatcagttaacattctccatttacctgattttttcttaattacaaaaaccggagaattccaaggggaaagtgttgtagctatgttctcattttctaattgtacattaacgaagttctctaaagtctccagtttctctttacttagcagccactgttctatccaaattggcttatctgttaaccattttaaaggtataggttctggaggcttaacaatgactgccatcaaaaatgataccctaaaccttggcgggaactttgtctctccacttgaagcattttttttcaaaccttgcaaattttttcctagtcccataccagggacatgccccatttcatgcatcatatgttgactttgagggctatataattgctctggaagtagaacttgtgctccccattgttgtaataaatctctcccccataaatttataggtacggaagttataattggttgaatagtcccaggttgtccatcgggaccttcacaatgcaaaatataatggctttgatatacttcaggggctttaccaactccaactgttttaagttgagtgtgttgaactggccacgcagacggccagtgctgtcgagaaatgattgaaatgtccgctcctgtatctaccaaatctttacatttctttccctgaatagttatttcacaggtaggacgtttatcagtaatttgattcacccaataagctgttttgccttgtttatttgtgcttccaaatcctcctgtttgtttaatttcactcttcccattcccacatacggcacaatcaggagctgtgctatacactctcctggctctgctttccagggaacagaagtagatataacaatttgaatttccccattgtaatctgaatcaatgacccctgtatgtatttgtatgccttttaaacttaaactaggccttcctagaaataatcctatcgttcccgctggcaagggtccacagacccctgttgggaccttttgcagggtttccccaggcagaagcctcacagcttttgtgcaacataaatctactgtggtgctactggctgtggcgggggacagatattgtacaaggatgagggaatggcctgagccagaaatgccccggtttggaatggggccccgggatgggcccctcatggtgtttcctgaaatcaggttcccatctttatcaaacttagagtgacactgattagcccaatgttttccttttttgcattttggacatatttcaggctcagtagttttctttttttcccctatatggtggcctgacttgctgattttttctacattgttttttagtgtgatcatgcttcaaacagttaaaacaagctccaggaaatggagtatttcctttatccactctcagtcctgccattgcctgtgccaacaaagtagctttatgcagattacctccgataccgtcacaggccttgatataatcaactaaatgtgctttccctctaataggtcgcaaagcagcctggcaatcgagattaacattgccaaaagctaataactgcaacactatatcctgagcagctgaatctgaaatcacctttttaagagactcctgtcttaagagattccaagctataaaatctgcatacagttcttttggtccctgttttacagcactaaaggaagggtattgttctccacctgaagtgattttttcccaagctctaatgcacactcctctaagctgctctacggcatcatcctgtatgaccacttgtgcgtctaaaccagcccagcagccgacccccaaaagttggtccatgttatattaatttgagtttcggcctgggcattgcaagcagcctgaatggaagcttcatctgcccaccaagttttaaattgtaagaattgagcaggacttagacaagctcgaataagagtgtccctgtcagtaggaatcatccgactggaaacagcaacattctttaacagtcccattacaaaaggagaacctggtccatactgattaatagcttgtttaaattatttgagtaatttaaaaggaaaaggctcaaatgtagctataatatttccctgttgatcaggtggtgtattctaacagggaactgccaagcctctatatcaccctctcgtctagcctgctgaactcctgcctgaatagaactgacagcagtcgctcgaggtgctgctcagtcactggggcaactacttttcgcccagtgtcctccagaaaagaaagatctggagggtctggccactctttttcttcaaaataataatgagggggtgcagaagggtagggatgaacctcttcctcctgtgccactttagctttagctggcaaataaacctgctctgtaacctcttctgttacttcgtcatactctccttcctcctcatcatcagtgtgaaaaagttccaaggtggaacgaaccagagcccacacttgtcccattgttacccgatgcttccaagctccccatcttactcactacgaggattgcttaagagtacttgggtgtcctccagcttagttccccattctccaactgttgctctggcgacccttcaacctggattcgagcccccacgtatgggtgctgcttactgagaccagcttggtgggggagaccctaacccagcagagctagaggaattaaagatacacacacagaaatatagaggtgtggagtgggaaatcaggggtttcacagccttcagagccaagagccttgaacagagatttacccatgtatttattgacagcaagccagtgataagcattgtttctatagattatagattaactaaaagtgttccttacaggaaacaaagggatgggctgaaatgaagggatgggctctggctagttatctgcagcaggagcatgtccttaaggcacagattgctcacgctactgtttgtggtttaagaacacctttaagtggttttccactctgggtgggccaggtgttccttgcccccattccggtaaacccacaacattccagcgtgggcatcatggccatcacgaacatgtcacagtgctgcagagattttgtttatggccagttttggggccagtttatggccatattttggggggcccgttcccaacattacagaaacaaaatgcagcatctactatcactatctttttgttcagtcatccattatgtgaatgacaacttcattgttactaactttggaaagatcccatttcaaagaaaaatgggatttcagcttcttcagtggtagattttcttacactcagcagctaataaaatatctgaaccccacaaaaaacccctgtttatctctgttatctctgggtatagaaaaatgctgaattcttatttgtatgtgaaataaagtggtttttcaataagaaattttgctataaggtaagaattttattctaaatataatttctttctttctttctttctttctttctttctttctttcctccttccttccttccttgttttttgtttttgagacaggttctcactctgttgccgcgtctggagtgcagtggtgcgatcttggctcactgcaacctctgcctcccaggtttaagtggttctcttgcctcagcctcccgagtagctgggattacaggtgcccaccaccatgcccggctaatttttgaagttttagtagagacggggtttcaccatgttggccaggctggtctcgaactcttgacctcattcctagagcattttttccattcatcttttattagtattcagatacacctagcagctggtatgttttgtaggatagtttttggtcattcattctaccatgatttagcttagtattaaaggtttatagaatttccttttagtttgtaatttagaaacaagattgacatttacttcttgttcatattctctaagttttcacaacagcttctctcagataagatctcaaggccagacatggtggctatgcttgtaatcccagcactttgggaggcccatatcacctggggtcgggagttcgagaccagcctggccagcatggtgaaaccccgtctctactaaaaatacaaaaattagccaggcatggtgacaggtgcctgtagtcccagctactcaggagactgaggcaggagaatcgcttgaacccaggaggcgaggttgcagtgagccgagatcatgccattgcactccagcctggcggcagagtgagactttgtctcaaaaaaaaaaaaacaaaaaaaaaaactccaataatcagttcaaggttgaactgctaacaataagatttgaagttaacatttaattaatttatttattttttagactcagggcctcactctgttgcccaggctggtatgcagtggcaccatcagagcttcctgcagccttgaactcctgggcttaagggatcctcccactcagcctcctgagtagctgggactacagatgtgcaccaccatgtccagcttaacattttattttatctgatagtagagtgaagcacttgcattacaaaaataaaatacatacaaattacaacaactttgccaatctaacatatgacctcgaatgatagttaaattaggagccagtcagccactttcagacatgtttttcaaagtgaaattttaaaggcagtgtcattgtttacttctactaatgctcataggtttagctgtggtcctgctatagagtttgttaagaaaacttccctgagttgttttaaatggtcttatcaaagccaaacactgaaatcctataatcattggaattgggaacaaaagatacatttctaggctttattttattataaattaaaatcttagtgattgtaggatcatttttccttatggattttttctaatatatttaaagcatagataattgtgttcaatcagttgtattttatgctgaatcatttgaccatgtgaggaaagcatatttttggactcttatcccatcttgaccagagggatcagtaaaaacctggaatgaagaagttcttcatgtgcacatctttttttcttgtgtgcactgcccttcattcacacttctgtgcattcacacatttgtgattgcacgttttggtattgatttagaatcatttattaattccacagtcaagttaataaaatgccattgggaattaaagataaattttacatgcattttctcaaaattcattacttgatccatttattcattctaaacccatgtcaaatgccattctttaaacctcatgttttattaaagttgatttcacttattaattcaatcaaaagccattgaagtttatagcaagaggcatcaaagaaggcagaatgtttctatctgttctgggattaacgggggtagaaagatgggaagggcagagggacaagaggcctcacagagacagacaagatataaagacacctgcttccctggccagaaaccaacttccaggattcaggattcaggagtaaagtgtcccaataattagaaggtttcctggtctctctcaaattcagtgctcatttggccagggataaggccctcacaccctttgctttgaggatccaagcttagaatgtggctgtctctgggacatttcatgctaaagaaagcccagcaagtgtagacaaagagtctagagggcaccagccacccttccatggaactctgttcaaggcaactctctgtgttctgttacttatattggccgcgtcttcaggaatttagcgaaatggccatgttgtctctgagtggaagtgaggggaggccactgggcagtcagagattttgaatccctgtttcctttccccccatctcaaccagaggccacttgtggaagcccaagaaaaaaagacacgaatgtcagaggtgaatccaggctcatgaacccattgtggtcacgggactgaagccacgtggcccaacagtaatgaagtctatgaggccttggtaaccccaaagctctcccccaattaggagctgcctctcactgccatcaggcaccccaggagctggacatgtggcattctttgtcatgtctgatgaggaactggagaggtcccacagcatatagaccttgatcgaattcgagctagagtggagtcaggcaaaactctgcattgactcagaggcacctacacgtgaaataaagtctccactcagagcttccatcagagcatcaggctcagtagcaattcccttctgctgttgctgtatttgccctgtgacaactggtgcttgaaggaaggagaaatcattatgtgtgcaggaaagcacatgcaattagaaaactgggacatgattcataaggcaggagggacccttttctctttcgtggtagatgtgggactccctgtcatctttgtcctgatgccccaagtgcacaaggtgaattttcctgctctcagttgagtgaccaacactgggagctggaattcagagaaacagtggcagcctctctctctccatcccccatcccagtaaatctaaggcaagggcctagggctcttgcactttattttcaccatgcattttccttctctggttaagaaaataaccaaatggccaggcgtggtggctcacacctgtaatcccagcacttcgggaggctgaggtgggaggagcacctgaggtcaggagttcgagaccagcctggcaaacatgatgaaactccatctctaccaaaaatgcaaaaattagccagatgtggtggcatgcacctgtaatcccagctactcaggaggctgaggcatgaggatcacttgaactcggaaggtggaggttgcagccagctgagattgtgccactgcactccagcctgtgatagagtgagaccctgtctcgacaacaacaacaacaacaacaacaaaaaaggaaataaaaaaagagaaaataaccaaatgtataaaaatcaaggttgcaattctgcaattcttgtggcacccagaatactggactagaccaagggtgccaggtgcttgtcactgctccaccactcaacggctgtgacctcaggagaatctctccaagtcctggtgcttgttaattcatctgtgagtcatggataaacacatccattctagtgagaataaatgaaaacacatttcatccttactgagatgcagtgagtgttgccccagtactaaggggtaaatgcagagagaaacattagtttaggatttttttttttttgagatggagtttcactcttgttgcccaggctggaatgcaattgcatgatctctgcttactgcaacctctccccactgtgttcaagcaattcacctacctcagcctcccaagtagctggaactataggcttgtgccactatgcccggctaatttttttgtatttttagtagagttagggtttcaccattttggccagactggtcttcaactcctgatctcaggtgatccacccgcctcagcctcccaaagtgctaggattacaggtgtgagccaccgtgcctgaccatcagctcgggattttaagaaacatccttaaaagtaggaagaaagcacataatacctgcaaagccctgggtaaaaatcctcttttacttcagtaatgattacaaaataattatttctcataacttctagaaaattagaggaaaactcattccttcaacatctcaagaaacttaaatacagatggtgattatatatcagattggaaccacaagctttgttctgagtaaaactgaaaagaaatggggatatctccatttttgagtggtgaccatgggacccaaagtggtttgtaaatgaccctttatcatctacacttgtcaattttcaattgattcactcatttcttagaaatccctgataattcataatcttgaaaaaatttcatgtccagatactaggcagggtaatatgtttgttttaatttgctagggctgccataacaaagtaccacacactgggtgacgtaaagaacagaaaaattattgtgccacagttccagaggctggaagtccaagatcttggtgttggcagtgcacatttcttctgaggcttctttccttggcttgtagatgtgttttccctgtgtctttacatggtcattcctctgcatcagtctatgtctaatcttctctttttataaggacactagtcacattgaattaagacccactcatatgacctcattttaccttaatgacctccttaaagacctctccaaatgcagtcactttctcaggtactgggggttaggacaccaacatgccaatttttggagagatgcaatttagcccataacagtctggattaacctggagactccttttccttccttccttccttccttccttccttccttccttccttccttccttccttccttccttccttccttccttttttctttctttctttctttttctttcttctctttcttttgttttcttttcttttattgagatggagccttgttctgtcacccaggctggagtgcagtggcacgatctcggctcactgcaacctccgcttcccaggttcaagcatttctcctgtctcagcttcccgagtagctgggattacagatgcctgccaccacgcccagctaatttttgtatttttagtagagatggggtttcaccatgttggccaggctggtctcatactcctgaccttaggtgatctattcacctcggcctcccaaaatgctgggattacaggcgccagctaccgctcctggccgagattgcgttttctaaagagtaaaacagagtaaatctctttggcttaactctgtctcttaatactctgaaattttgttcttgcagtgagaacaaaaaaaaaagacagccaaaggttggtgtcacgcagaaggtgagccctccctaactctggctgccccaagacgcagtgctgtgtcattcctgaaagtttgctccattctagtgattctggctccagctttttcattgggaagaggattctctcccagaggaaaaacttctcctgctatgcaggcttattttctttatatttgtaggacaaaaaagttgatgtaataaaaagaatatatttgtgaaatttttgtggtaatcattttgatatccttatcaataccccatattgtgatgaacatgttggcttcattttggcagaagggacatgacactggacattttgagccacaatttctctgggcctttccatgggattcagtttctgccctggtaggtgaagggagagctcttggtgtagggtttggtctttataataaactatgcttttggggtagcaggtttatctctggaagcatgaagcttagtcaggagtgcgaccctcctccccattcaaaaggtcaaggtagagcaggttcttgttcagggcgcagtgagcgagagaagggaaagtgacagagcattctttcacctttttgtgacatgcatgcatccaagtctctggtgttttaaataactgaaactgagacctagatccacttatctgtaaagtagaactgtggagaaggaagcatatcatccccgccactggagagatccctgaagagagatttgtgagcccccattttatcgaaaatgacacaaaatttcatcaaaataaagtgaaattgtggctgtagatggggttttatttagagctttgactccgcatctgcttcctaagacatggtccttccccaggatactacagaatcacagggcttagactggaggggtaaggcgtgatggtgttcttcctttctggccgataggatgttttggattgtatgtattttccaaagacggctgcagaagtatcttccatcacactttgttttctttagtttgatccaccactccctcatcaagaggtaagttctttccatccccttaaacatgagcagatctgatatctgcgttagccaataaaatagggcagaaacgtggttgtgtcagttctgggcactgctgttaaccatcctgcctgcatctggttccttccacttcaatccctgaaccatgttaaactccaaggccatcatctgagcccagccaacacatagaaccctatgagagatcattaaaaattcttagttactattttcaggaatatccttttccatcctttcattttcaacttgtatgcgtccttagatccaaagtgagtatcttgtagccagcatatggttagaatctttttattatatccattgtgataatctcaattctgattggggagtttaatccattacatttaaagtaattactgatgaagaaggacttacctctgtaattgtgatggttttatgcatgtcttatagctgtttcgtcccttatcttcctcattccaaccttcctttgtgtttagtcgatttttttctagtgatatgttttaattgccttctcactttcttttgtgtatattttatgtatattttctttgtgattactatggtattgcacataacaatacaactataacaattttgaattgaaaccagtatgaaactctgcttctttacatctttttccacccctcattttacattattgatgtcacaaattactcctctgcaggctagcaggctggaaagtcacaatgttgcagtcttcagtctaaaatttgtaaaccaggctggcagattggaaatctaaactgtagttgctactgtcatcttgaggcagaattttttcttctttgagaagcctcacactttgcccaaaggccttcaactgattcaaaaagtcccgcccacatttttgagggtaatttctttttcataaaatcaactgacataagattttaaccacaagtgcaaaacaccatcatagcaacatataaattagtgtttgattaaataactagacactatggtttagtaaaattgacacataatacccaccaccctagtccatgcttgtgaacttggcacccattaacgttttcttaaaccatacttagtctccaaataaaaacaattataaagtcatacttttgctaaagatgatacagctatcttgcatccatctaaaaacactaaccatttcctcagaaaaaaattcaaactcaatgcatgataagcatttttctcttcgatatactgtaacctaaacaccatgtttaaaaaaagttgaaccatcattaataaaagggaactattattagcacattttatgttttattacaagatgataaggaaaagatgaaaacaaaggtatttgcttagtacatgtatgggtacatacacacagacataaatatcattgtaaaaacataaggaagaaatgcttataacatttactgtctttatttctgcaactgatcacatggttacagctggttatttatttatttatttacttatttatttatttgatacagggtcttgttctgttgcccaggctggagtgcagtggcattaccttggctcactgcaaactccacctcctgggcacaagtgatccttctacctcaacctcctaagtagctgggactgcaagcacaccaccaagtctgactaattttttgtatgtattttcagtagagatggaatttcagcatgttgcccaggttggtctcacattcctcaacttaaggaatccacctgcctcagcctcccaaagtgctggggttataggcatgagccactgtgctggccacaactagtgtaaatagctttctttcactaaccatcccatagtcccactgccttcagcaagtccgtcagctgatcaggtttcttttcctgcttgggtgactcataccttcattcctgaagggcatgggtcattagtagtcctgcctgacttgggttgttgtagtttttattgactttaattatagagcagagtattactaagagatgctctaaaagatctcctgtatttcaaacatagtcttatttactgccattgtgtagtagcagaccaatttccccctgatgaccaggaccaatcaccccagaaagtgcagtaactccttcctttgtctgttgattcagtaacatgaggagctgaagggcccgggtgggtgtcttagcttccagctcaatggaataatttctgtgtctcctgagggagtattcctccctttggtaaacctctagatcctgatcctattcctcgtgactggacaagacctcccaaccagggtctccagtacctcctacaggtgtgtttgggctggcaacaggtctgtactttcctgagacagagctcccaaaggaaaaggcagactaccatctttgctgttatgtagctttcactggtgatatctccagttactggaaaatctgaggcaactggggactggagcaggccctcagcaaactgcagtagccctacagaaaagtggccagactgttgaaagagaaaacaaaagaagagaaaaacaaaacccattcatagatcagcaacctcaaagaatgaaggtagataagcccactaagatgagaaagaatcagcacaacaatgctgaaaactcaaaaagccagcaagggtttggaaccaggctaaagctgagatgactgaaagagcagaagtagaattcagaatatggagagggaagaagttcactgtgctaaaggagtacagtgtgacccaatccaaggaagctaaaaataatgataaaacattgcaggagctgacagacaaaatagccagtattatagaagaatgaaaccaacctgataaagctgaaaaacacactaaaagaatttcatagtgcactcacaagtattaacagcagaatagaacaagtggaggaaagactctcagtgcttgaagaccagctttctaaaataagacaggaagacaagaatagagaaaacagaatgaaaaggaacaaacaaaacctctgagaaacatcagattatgtaaagaaactgaatccatgaattattggtatacctgaaagagatgggaataatggaatcaatttggaacacacttcaagatatcatccatgagaactttcccaacctagctagacagaccaacattcaaattcagaaatgcagaggacactagtaagttactccatgagaagatcatccccaagatacaatcatcagattctccatggttgaaatgaaagaaagaacgttaagggcagccagagagaaaggccaggtcacctacaaagggaagcccattagactaacagtggacctccaagtggaaaccctacacaccagaagagattgagggccagtattgaacattgttaaagaaaagaatttccaacccacaatttcatatccagccaaactaagcttcataagcaaaaaagaaataaaattcttttcagacaaacaaatgccaagggaattcattaccaccagacctgcattacaagaactcctaaaagaagcactaaatatggaaaggaaagacagttaccagccactacaaaaacacgctgaagtacatagaccagtgacgcaataaagcaaccacataagcaagtctgcaaagtaaccagctaacaccatgatgacaggatcaaatccatacatatcaatactaaccttaaatgtaaatgggctaaatgccacatttaaaagacacagaagggcaagctggataaagaaccaagacctatcagtatgctgcctacaatacactcatcttacattcaatgacacacataggcacaaaataaagagatggaggaaaattttccaagcaaatggaaagcggaagaaagccagggttgcaatcctagtttctgacaacacagactttaaaccaagaaagataaaaaaagataaaggtgggcattacataatggtaaagggttcaattcaatgaagagatctaactatcctaaatatatatgcatccaatagaggaacacccagatttataaggcaggttcttagagaccgtcaaagagatttagaacctcacacagtagaagtggtggactttaataccccactgacaatattagacagatcatcaagacagaaaattaacaaagatattcaggacctgaattcagccctggagcaaatggacctgatagatatttacagaactccagaccccagaacaacagaatatacatttttctcattgctacatggcacttactctaaaatcaatcacgcaatcagaagtaaaacactcctcagcaaatgcaaaagaactgaaatcataacaaatagtctctcagactacagtgcaatcaaattcaaaatcaagaataagaaattcactaaaaccatataattacttagaaattaaataacctgttcttgaatgacttttagtaaataatgaaattcaggtagaaatcaagaagttctttgaaactaatgagaaaaaagatacaatgtaccagaacctctgggaaacagctaaggcagtgttaagagggaaatttatagcagtaaatgcccacatcaaaaagttagaaagatctcaagtcaacaacctaaaatcaaacctaaaagaacttaagaatgaagagcaaacatatcccgaagctagcagaagacaagaaataacaaaaaaaattaacaaaagtattgtctcctgaaggagacagagacacaaaaaaccatttgaaggatcaataaattcaggaggttttttaaaagaaattaataaaatagaccactagctaagctaataaagaagaaaagagagaaaattccaataaacacaatcagaaacaataagaggaacattaccactgaccccacagaaatacaagaaaccaccagaaaatattatgaacacttctatgcgcataaactagaaaatctagaagaaatggataaattcctggacacatacaccgcccccaagactgaaccaggaagaaatgcaatctctgaaaaaataatgagttctgaacttgaggcagtaatgaagagcctaccaaaaaaaaaaaaaaaagtgcaggaccagatgattgacaggtgaattctactggatgtacaaagaagagatggtaccattcctattgaaactattcccaaaaaatgaggaggagagactcctccctaactcattctattaggccagcatcatcctgataccaaaatgtggcagagatacaacaacaacaaacaagagaaaacatcaggccagtattcttgatgaacattaatgcaaaaatctccaacaaaatgctggcaaaccgaatcctgcagcacatcaaaaaccttatccaccacaatcaagtaggcttcatcgccaggatgcaaggttagttcaacatatgcaaatcaataaatgtgattcatcacgtaaacagaactaaagacaaaaactacatgattgtctcagttgatgaagaaaaggcttttgataaaattcaaactctattcatgtttttaaaaaaactctcaataaactaggtgttcaaggaatatacctcaaaacaataaaagccatctatgacaaacccacagccaacttcatactgaatgggcaaaactagaagcattctccttgaaatcagcacaagacaaggatgccttctctcactgctcctgttcaacacagtatcggaaattctgaccagggcaatcaggcaagtgaaattaaaaaaaaaaaaaaaaaaaaagaaggatgttcaaataggacgagaggaattcaaatgattcctgtttgcagatgacatgattctataactagaaaaacccatagcctcagtccaaaagcttcttaagctgataaacaacttcagcaaattctcaagatacaaaatcaatgtgcaaaaattactagcatttctacacactgacaacaggcaagccaagagccaaagcaggaatgaactcccactcacaattgccacaaaaagaatacaatacctaggaataatgctaatttgggaggtaaaagatgtctgcaaggagaactactggtcccaaaaagtgtgcattaatgttagcagtagctatgataggctgggtggaatgcccataggtggtgtttgcaggtaggtgacagctaaggtgatagcacccaacctcggttacccaggaggagttctcaggtgtccaccgtggtggattgggttgagcaattcccaggaccctgggctgtgttctctgtctcagtggaaaaaggaaatgaagctgtcttttcatcactaaatgctgtgccaactagtcccttaattttctttttgcctgaaggactgaaacatttattatagtttagatctgctagttataacctttttcactccctatataactaaaatctatttttcgatagctatattcatggtatgttaattggttaattagtttgatttaatcattacacatggtatacatatatcagtacatcacacaacatctcatgaatgtattatgatttgtcaatttaaattatacatatatatgttttagaaaggtattattttctgggaatagaatctagtttcacagtattttccttttaggactttaaagatgttgctcatctgtcttctcatttgcattgtttccagtgaaataacggctgtcatctttattattattctcatgtctttttttttactttctgcttattcatttttctctccttctgttttcaacaaatacatgtttttttcacccacagttatagaatgaacttgagcaacaatctataggaatggctttttgactgttggttgaaaatttttagaaacagttgtttgttccttgttttattaggacaaaggctaatttcctcagaatattcttaaattgaagaatgtcataattaattttatttgtcatcttggctgaaccacagtgcccagataggtgatcaagcattattctggatgatttgtgagaatgtttcttggataacattaatgcaaaataactagactttgagtaaagtagattgatctctataatgtgggtgggcttcattcaattcattgaaggtgtaaattgaacaaaacattgaccttctctgagcaagatggaactctgcagcagacagcgctgggatttgaactgcaatatccgtcaactgatctcaaacagctggttggtttgtgtacagcatttggaagatgaatggacaacatcctgtttggaagtccaccgctttgatcgaagaagataaaaacagaacaactcttgtgggctgaattgcagggtgtttctcagcagtagtggaagaattgaacaataataaagctcctatgttttagtttttattgacttacaggcagtgactaatggcctggccatataattaatcaggaaagcaaaggaaaacttgctgatgaaaagagtgcccaaatgagacacagtcctatggaaatcacgatggtaatttgagaggttcattaatgtaagacacgttgatgcctgatatagagtggatgttgttcttgcccgaatctcatgttggatggaatccccagcattagaggtgggacctgcagggaggtgattggatcacgggggcagtttctcatgaatggtttagcaccgtcccctcagtgcccatcaatgcccatcagaataactcccttccaggtttggaaggtgattgaaataaacaagcatttatctccaagtgtttgccaggtgcacctgtaattccagctatgacaacagctgaggcagaaggatatcttgagtccaggagttagagtttggcctgagcagcacttgagtccagccagagaaagatatcaagaccacatctaaaaaaaatccacgtttgcttgtggtgatcccctgggtccatgaaataagtagacactggggctgtagcaatgcagagagagatggaatcaaggcatattcctcttgcattccccacatcacaggcacaaaatacatataagtgttttctttaacaaaaaaaaagagagagagacagagatagcatatggctatgtggcagattcttttatgggaagatcttgaaaatacagagctggcaagttacactgataccagtagccccaggaagcagcaaatgggtcttggcagcaatagatacgcaccctggagctgggcattgctcagctgctggtagatgtgttaccaaacagaactggagtccactcaccaggggcagtaaaaacaaacatccatactgagattttgtagtgagataaaggagggcatttatttgtagggtgccaagcaaggagaatcagccagctcacagttaagacccaacctcctcaatggctcacaagcaaggtttcttaaagataggggtaaatttcaggaaagcagagttataggcaacatcataaatcaatgcatagaagttacacactggtttggccttaaaaggaggaatatcctgatgagggagcttacaagtcgtagatagagataaagattctctgatttgtgattcataaggaagcaaagcttccttacacagttgggggcagtagagaggaatgttcaggcctggcctgtgggctttactctctccaggcccctcaggaagaaatttagaacaaagaacagtggtcagagttcagtcctcagtttccccttatctgaggtcttcctgtcagtggatctattaggtgggaatctgagtttctgaaaaacaactcagggacatatattaagatgttctctttagtttccatagagaatccaacatcttgtgactctaacttccttggctatcgttttaagctatcattaccttcttgtttataaggtcactcacttactttttagggctggctaggtgcctggaatttcttttgaaggaactgaaggtttttctttatttccatgttgggaggccctggcaggcttctaagagaggtccctgctttatctcagatgcaaatgctcagagtgctactaagagcttgaatgggaggtactgcaaccatgtggaccactgagtcacatttctttacaccagaaaatgcgcttgctcaaaattccagaaagacatccttctcagaggaagagttccataaagaattaaaatattccattgaaacattggttgtataaagcaagagtggggaaacaagcatgaagggtgggcttacacaccttcatgagtgtgcttacacttgatatgaaagtatcctctcttttccttgtggatcaggggaaggtgctggtgtgatctatatacaatccttcccaaggtgggaggacactggaatgatgactgtactttacctcaacttgcttttctcatacctgatgcagtggtctcaggactagggatgcaaataaaagtccagaaacaggaattattcctaagcaagaaactgtaaatatattttgtgtccattatgtaatgattcctaagggtctggagaagtaggttgtgccttcagtgcatctggcaaagttggggttaacactgaatgcagctgtattgcctggggtcagctagccaaccagttctctactgcataaccctaccctctatgaactggaatggatgatgcaagacaattgctagaacagtattggtccgtgcagtctaggtcagcacagcagcagaacttcatgtcccttccataactagaaatgtttggtataaatgaagagaaggagaaatagtagctgagggtaaatgaatgaataaatgggttatgcaatgaggaaaatccaatgttacatgaactactcaaaagagatataagcaagagatgatattgtctcttaactcaattttaccaaatgcctgaacgggtgcagccttatgttgctgagactacttctgttttggggctgcaccgggataatttttttttattatactttaagttctagggtacatgtgcacaacatgcaggtttgttacctatgtgtacatgtgccatgttggtgtgctgcacccattaactcgtcatttgcattagatatttctcctaatgctatccctcccccctgtccccaccccatgacaggccctggtgtgtgatattccccaccctgagttcaagtgttctgattgttcaattcccacctatgggtgagaacatgcagtgtttggttttctgtccttgtgatagtttgctcagaatgatggtttccagcttcatccacatccctgcaaaggacatgaactcatccttttttatggctgcatagtattccatggtgtatttgtgacacattttctttttttcttttttctttttgagatggagtctcgctctgtcgcccaggctggagtgcagtggtgcgatctcgctcactgcaagctctgcctcctgggttcatgccattctcctgcctcagcctcccaagtagctgggactataggcacccgccaccatgaccagctaatttttttgtatttttagtacagacgggttttcactgtattaggcaggatggtcttgatctcctgacctcgtgatccacccacctcagcctcccaaagtgctgggattacaggtatgagccactgcacccggcttatgtgccacattttcttaatccagtctatcactgatggacatttgggttggttccaagtattttctattgtgaatagtgcaataaacatacatgtgcatttatagtagcatgatttataatcctttgggtatatacccagtaatgggatggctgggtcaaatggtatttctagttctagatccttgaggaattgccacactgtcttccacaatggttgaactagcttacactcccaccaacagtgtaaaagtgttcctatttctccacatgctctccagcacctgtggtttcctgactttttaatgattgccattctaactggtgtgagatagtatctccttttggttttgatttgcatttctttgatgaccagtgatgatgagcattttttcatgtgtctgttggctgcatagatgtcttcttttgagaagtgtctgttcatatcctttgcccactttttgatggggttgtttgattttttcttgtaaatttgtttaagttctttgtagattctggatattagtcctttgtcagatgggtagattacaaaaattttctcccattctgtaggttgcctgttcactctgatggtagtttcttttgctgtgcagaagctctttagtttaattaaatcccatttgtcaattttggcttttgttgctattgcttttggtgtttcagtcatgaagtccttgcccatgtctatgtcctgaatggtattgcctaggttttcttctagggtttttatgattttaggtcgaacatttaagtctttaatccatcttgaattaatttttgtataaggtctaaggaagggatccagtttcagctttctactatggctagccagttttcccagcaccatttattaaatagggaatcctttccccatttcttgtttttgtcaggtttgtcaaagatcagatagttgtagatgtgtgatattatttctgagggctctgttctgttccattggtctatatctctgttttggttccagtaccatgctgtttttgttactgtagccttgtaatatagtttgaagtcaggtagcgtgatgcctccagctttgttcttttggcttaggattgtcttgacaatgcaggctcttttttggttccatatgaactttaaagtagttttttccaattctgtgaagaaagtcattggtagcttgatggggatggcattaaatctataaattaccttgggcagtatggccattttcacgacattgattcttcctattcatgagcatggaatgttcttccatttgtttatgtcctcttttatttcgttgagtagtggtttgtagttctccttgaagaggtccttcacatcccttgtaagttggattcctaggtattttattctctttgaagcaattgtgaatgggagttcactcatgatttggctctctgtttgtctgttattggtgtataggaatacttgtgatttttgcacatggattttgtatcctgagactttgctgaagttgcttatcagcttaaggagattttgggctgagatgatggggttttctaaacatccaatcatgtcatctgcaaacagggacaatttgacttcctcttttcctaattgaataccctttatttctttctcttgtctgattgccctggccagaatttccaacactatgttgagtaggagtggtgagagagggcatccctgtcttgtgccagttttcaaagggaatgcttccagtttttgcccattcagtatgatattggctgtgggtttgtcataaatagctcttattattttgagatacgtcccatcaatacctagtttattgagagtttttggcatgaagggctgtggaattttgttgaaggtctttttggcatctattgaaataatcatgtggtttttgtctttggttctgtttatatgctggattatgtttattgatttgtgtatgttgaaccagccttgcatcccagggatgaagcccacttgatcatggtggataagctttttgatgtgctgctggattcggtttgccagtgttttactgaggatttttgcatccatgttcatcagggatattggtctaaaattctcttttttttgttgtgtctctgccaggctttggtatcaggatgatgccaacctcataaaataagttagggaggattccctctttttctattgattggaatattttcagaaggaatggtaccagctcctctttgtacctctgttagaatttggctgtgaatccatctggtcctggactttttttggttggtaggctattaattattgcctcaatttcagagcctattattggtctattcagggattcaacttcttcctggtttagtcttgggagggtgtatgtgtccaggaatttatccatttcttctagattttctagattatttgcatagagatgtttatagtattctctgatggtagtttgtatttctgtgggattggtggtgatatcccctttatcattttttattgtgtctatttgattcttctctcttttcttctttattagtcttgctaacggtctatcaattttgttgatctttccaaaaaaaccagctgctggattcattgattttttgaagggttttttgtgtctctatcttcttcaattctgctctaatcttagttatttcttgtctcctgctagcttttgaatgtgtttgctcttgcttctccagttcttttaattgtgatgttaggctgtcgattttagatctttcctgctttttcttgcaggcatttagtgctacaaatttccctctacacactgctttaaatgtgtcccagagattctggtatgttgtgtctttgttctcattggtttcaaagaacatctttatttctaccttcatttcgttatgtacccagtagtcattcaggagcaggttgttcagtttccatgtagttgagtggttttgagtgagtttcttaatcctgagttctaatttgattgcactgtggtctgagagacagtttgttataatttctattcttttacatttgctgaggagtgctttacttccaactatgtggtcaattttggaataagtgtgatatggtgctgagaagaaggtattttctgttgatttggggtggagagttctgtcgatgtctattaggtctgcctggtgcagagctgagttcaagtcctggatatccttgttaactttctgtctcgttgatctgtctaatgttgacagtggggtgttaaagtctcccattattattgtgtgggagtctaagtctttttgtagttctctaaggacttgctttatgaatctgggtgctcctgtattgggtgcatatatatttaggatagttagctcttcttgttgaattgattcctttaccattacgtaatggccttctttgtctcttttgatctttgttggtttaaagtctgttttatcagagactaggattgcaacccctgctttttttgttttccatttgcctggtagatcttcctccattcctttattttgagcctatgtgtgtctctgcacgtgagatgggtttcctgaatacagcacactgatgggtcttgactctttatccaatttgccagtctgtgtcttctaattggggcatttagcccatttacatttaaggttaatattgttatgtgtgaatttgaccctatcgttatgatgttagctggttattttgcccgttagttgatgcagtttcttcctagcatcgatagtctttacaatttggcatatttttgcagtggctggtactggttgttcctttccatgttagtgcttccttcaggagctcttgtaaggcaggcctggtggtgacaaaacctctcagcatttgcttgtctgtaaaggctcttatttctccttcacttatgaagcttagtttggctggttatgaaattctgggttgaaaattcttttctttaagaatgttgaatattggcccccacttgcttctggcttgtagagtttctgccaagagatccactgttagtctgatgggcttccctttgtgggtaacctgacctttctctctggctgcccttaacattttttccctcatttcaaccttattgaatctgacaattatgtgtctttgggttgctcttcttgaggagtatctttgtggcgttctctgtatttcacgaatttgaatgttggcctgccttgctaggttggggaagttctcctggataatatcctgaaaagtgttttccaacttggttccattctctctgtcattttcaggtacaccaatcaaatgtagatttggtcttttcacatagtcccatatttcttggaggctttgttcatttctttttactcttttttctctcaacttctctgcttgcttcatttcattcatttgatcttcaatcaccgataccctttcttccacttgatcgaattggttactgaagcttgtgcatgcgtcatgtagttctcatgccatggttttcagctccatcaggtcatttaagttcttctctatgctgtttattttagctaactattcatctaatcttttttcaaggtttttagcttccttgcgatgggttcgaacatcctcctttagctcagagaagtttgttattaccaatcttctgaagtctacttctgtcaacttgtcaaagtcattctccatccagctttgttccattgctagggaggagttgcgatcttttggaggagaacaggtgctctgatttttagaatttttagcttttctgctctggtttctccccatctttgtggttttatctacctttggtctttgatgatggtgacctacagatggggttttggtgtagatgtcccttttgttgatgttattccttctgtttgttagttttcattctaacagtcgggaccctcagctgcaggtctattggagtttgctggaggtccactccagaccctgtttgcctgggtaacactagcagaggcttcagaacagcaaatattgcagaacagcaaatgttgctgcctgatccttcctctggaagtttcgtctcagaggggcacccggccgtatgaggtgtcattcggtccctactgggaggtgtctcccagttaggctactcagaggtcagcgacccacttgaggaggcactctgtccgttctcagatctcaaactccatgctggcagaaccactgctctcttcaaagctgtcagactgggacatttaagtctgcagaagtttctgctgccttttgttcagctatgccctgcccccagaggtggagtctacagaggcagacaggccttgttgagctgcagtgggctccacctagtttgagcttcctgccactttgtttacctagtcaagcctcagcaatggcagacgcccctcccccagcctcactgtcacctcccagttcaattttggactgctgtgctagcagtgagcaacgctccatgggtgtgagacccactgagccatgcatgggatataatctcctggtgtgccattcactacaactgttggaaaagcacagtattagggtgggagtgtcccgattttccaggtaccatctctcatggcttcccttggctaggaaagggaattctctgagcccttgtgcttccctggtgaggcaatgccttgccctgcttcagctcacattctgtgggcaacactcactgtgtgacaagtcccaatgagatgaacccagtacctcagttggaaatgcagaaatcacccgtcttctgcaccgctcacgctgggagctgtagactggagctgttcctatttggctatcttggaatgatctcccctgggataatttttcatgaccaaaaaggattctggtaatgtgccaggatcttctcactgttatgattcttctggtataggagatctgtgattggccaggcacagtggctcagacttgtaattccatcagtttcggaggccatggtaggaggattgtttaaggccaggagtttgaaaccaactggggcaaaatagtgagaccccattcctacaaaacctttaaaaaattagttgggcatgctggtgtgtacctgtaatgctattgctcaggaggctgaggcaggaggatcacttgagcccaggaattcaaggttacaatgagctatgattgtgccactgcattctaccctgggcaacagagcaagaccttgtctctgaaataaataaatattataaaaagagataatgtggtcaaagaccagggtgtgatctgtggcccaataaaaatatctggtctttttccctgtttcctgacaagcaggttccaaaacatttgcaatctcctcagtgataagtatgactttaatatgccaatgagatgactatggggtgaggggctcctaaatagcttcaggatgggggctggttgccagaaacacgaagctgtgattagaggattggaaatttcagcagtatcccttacctctgagaagcaaagggggctggaagttgagttcagtcaccagtggccattgatttaattaatcttgcctacacaatgaaacttccatagaaacctctagagattgggttttggagagcttcccaattgctgagcacatccgtgtgtccatgtgctgggaggatggtgaacctcatctccatggggacagaggctcctgtgctcagagccctcccaggccacaccctgtgcacctcttcatctggctgctcatttgtaccctttataactgctatggtttgaatgtttccctagaaaagcatctcttggataatttatcctgaatgcaacatttttaagaggtgggacctttgagaggtgattggaccatcagagctctgcctccattaatgaattaagtttgatcataaaaggacctgaggctgtgagtttgacctcttattccccctacctctcaccctctcttgcccttttgctttctaccaggtactgtccttggtcttggaattcccatcctcaacaaccatgaaccaaataaatttctgttcgttttaagttatccagtctcaggtgttctactatagtggcataatttaaaccaagagtccgtaacccccggctgtggactggtacaggttcctggcttggcaggaaccagaccacacagcaggaggtcactggtgggtgagagagcatgagcatgaccacctgagctctgcctcctgtcagatcagtggcggaattagattctcataagagcatgaaccctattgtgaactctgcatgtgagggatctaggttgcatgctccatatgaaacagtaatgcctgatcatctgaggtggaacagtttcatcctcaatccattcccctctattccctgccacctctgctggtccatggaaaaattgtcttccatgaaattggtccctggtgccaaaaagttgggaccactgatttaagctataacaataataaactacaatactgagtgtgaaagaaaaataaaatttagggacgccaaattcactataccaaagggacaagttaagtttggtaactgagtgatggaaaaaccgcctttcttttgttcctaaacaaataactgcaaagatagaggaacatatatctccccaggtggcctccctcacaaattgctcaccagataattccttgtgggccccaacatctttactctaaaacagagttttgttgaatttcaccctaacaatgtaaattaacagcttatcttcacaggtgaaggacaaagacaagaccagaaatcatccctccactcacctggagacaaatgtgtatttgacttctctacccaacatttactttgtcttatgtaaaatgcagatttactgagcactcgatgaaagcatagttgactgttcctttttcctctcctgcctgctctttctcctgtaaatattaaagtcctcaaaaccctcttagtaaaaagcatgggccacagatgctacaataatttgtgtctctgtttccaaggtacatcttcagcttggcaaaataaacttctaaattgattgatacctgtctcagatgttttttggtttacatggttatagcaacttcctgagttctttgagttagtttaagaattcccaaaccttgggaggtgagaaacccctgactttgcagccatgatagacagaagtgcaggtaacctggaacccgataacttgtgacttgcatctgaagtgaggacagacttgtgagactgagtccttaaacctgtggagtctgaggctaactccaggtagttagtgtcagaattgagtcaaatcctaggactcccaattgctgttggagaatcagaaaattatttggctggaggaaaaccccatcaccatcccacagagagaaacttacagtatattgggggaacccacccccaatatttcaacataggttctttctattttccataagtgtcggccagctgagaaataaagaaagacagtacaaagagaggaattttacagctgggccaccaggggtgacatcacatatcggtaggaccatgatgtctgcctgagtctcagaccaacaagtttttattaagggtttcaaaaggggagggggtgtaagaataaggagtaggtaaaaagtcacatgcttctgagtgcaaaaagcagaactactaataagagtctaacaaagatcacatgcttctgagggaacaagacaaagggcaaaagcagaaccactgataagggtctatgtttagcagtgcacgtattgtcttgataaacatcttaaacaacagaaaacagggtttgagagcagagaagtggtcagaccacaagtttaccagggcagagtttttccccaccctagtaagcctgagggttctgcaggagaccagggcgtatctcagtccttatctcaactgcataagacagacattcccagagcggccgtttatagacctccccccaggaatgaattccttcttcagtgtattaatattaatattccttgctaggaaaagaatttagtgatatctttcctacttgcacgtctgtttataggctctgcgcaagaagaaaaatatggctctttttgcccaacctcgcaggcagtcagaccttatggttgtcttccctggttccataaaaattgctgttattctattctttttcaaggtgcactgatttcatattgttcaaacacacgttttacaatcaaattgtagcactattatcacagtggtcctaaggtgacgtacatcctcagcttatgaagataacaggattaagagattaaagtaaagacaggcataagaaattataaaagtattatttgggaactgttaaatgtccatattaaaatgaaatcttcacaatttatgttcctctgccgcagctccagccagtccctcattcggggtccttgacttcccacaacaacagtaagagtaagcaagtaaacctctaccttcttcggtcccagaggaaaagataaaaaaaaattaagcatttatttcatgtccctaagtctgctaaacacaggtttctaccagctgttcattgtccagacatggagtggccctacctctaatctagaagttaggattttttaggcctttgagggggtcacataaaaactaataagtgtcagagattctctccccagaaatatttccacacacaagaaaatacaaatattaatataaaacatcagtgtgcaaccagatcctctgagatcttacaaaacctgggtgttttaatcccagtaagagacaatgccaagggaagatgtgtgaataatcatttcaccatcacaccatgccactccaataatctggagtatgaactgggatagacaaaaacttgatgtaataacttattttcaagggaatgggtggaaagatgttatttattagtcaccggttgattcagacactctgaatccctaccagatactaaataaatttcttgtcttggagcactgctccaataattaaaatttatcattcttttcccacccttcacactccagcacttgaaccctcttactacgtcagaattccatactgtcaatgaaaagaggcaaacttcataaaatatttgaagagatttattctgagccaaatacgagtgaccacagcccatgacacgtccctcaggagaccctgagagcatgtgctcaatgtggttggggtatgggttggttttatacattttaggaagatatgagacactaataatatatatttaagatatacattggttcagtccagaaaagcagaacaatttgaagcaagcgagggttgggggttactgcttctaggttataggtagattttaaaatgttctgattggcaattggttgagttattatcaataaaaaggaatgtctgggttatgataagaggttgtggagtccaaaattttatcatgcagttgaagcctccaggtgccaggcttcagagagaatagattataatgtttctgatcagacttaaggtctgtgttgatgttaattgctggtcagcttttcctgaattccaaaaggtaagaggccataatgaggcatgttcaacacctgcttcccatggtggcctgagccagtctttcaagttaatttttgagcgccctggctgaggagggtgtccattaagatggttgggagagggtgggtttgaagtttattttcggtttacaacatgtaatgtgttaagaggagatagaaaccacccccatccctagaagagcacaacactccagtcacccctgcagttgataatggacatgagtcttaaactccatcagtcagatgaccacctgctgaagcagcattgttgtctcaggtaaatactcagggttcattgtatctcaccaagaagattaaggacagtgacacacaaggagtgagtttattggccggtgctatgttgtctgctctttactgaacacatggctggcaaaaagaagggaagatggagccatcactgtgaacacgcctagtcccagatgtccttttcctattggcacagctgccagcattcacttgtgcaagcttccagcttgcttgtctatgtctgaagcttgattttacaggctggtctttgtcagaaaagaaaacgatttggggcctgctttccattaaaaagaaaaccttactgagacttctgtaccctcactacctgcctaaataatttcttcttaaatcctatatcactgccagactctgagctagaatgaggtgacacagaaaggctgggattgtgcagaatgcattttagtaaacatggctgagtgtcagtagtgatgtccagttgccaggggcagcagtgacatctatcctagccttggggtccagtgtccagcaccaggatgtcagaggtgtgagcagtggtgtctgtgctcagcagcaggggcagttgttcctaggagggacctgatccaggggcgtgggctatggattcttttctgggatgtgtagttttcagcctggttctgtggccttccccacaataaaattaacccccaataccaggtatactactttatgtataaattacagaaatttgttttccatagttttctccaagaagtgagtgagaaatgaatctatggaccagggtcagagagcagcattcggaggtgttccttgtgtgacagccacatcctgaattgtctacctggcctctacctcatggtggagagatcaacagggattatcacatctcttaactgatgatatacatcctccctttcctttctgcaagaaaaatcctcttttaaacagggtttgaaaacccacccacccaccctgggcactctctgatctctgaggttcctgatctggctgagcaacaagatttctggtggaggcttagaaaatactcaggccactcctcagaacccctgtctcacaatattatgcacaagaccaaggaatcatttacataacaagccctacaggcgaggccgatgcagacgtggggtcctggtgttctggctactccaagtgtgatctggagaccagcaacgtgagctccagccttgtcataaatccagaatctcttgctcgactccagacttcctggatctcagcaccacatccaggtgatcctggtgcacacgggagttccttgtctaagcgtcctctagacatggggccagaactgtgcagtctgctctgtggtctgatcagatcccttagaactggaggtccagggttcagtccttgcgctgattcttttccacagtcaatcactcccttggtgcttcatccatgcttgaggttttaagtatcgtttatgtggtgtgagctcctaaatctatttctccagcccagtcctttcccctgaactgtggagttgtctgcccagctgccaccccagctcccccacctgcattcctagtagacatctcctccactgagtgcctgtgatgccccctcctcaggatgctcctgccagagtctccccatctccactgacagcagctccacccttccttctactcactcattttacaactatgggtgtccttgattcgtctttctcacaccacagatacaatccattggcaaatgctgtgagtccatcttcaaatgcatccagaatcccctcacgtcccactatttcctgtgctcacaccccagtcaaggtaaccgacatctccagcctggaatactgcactcgattcctactgttttcccttctgcctccctcatccctcgcctctcaattctgttctcagcacagccatcagagatccttttaagaaagaagtcatatcatggctctcttctgctcaaaactgtcctctaactccccatcccactcagagcgaggtcagacgcaaccccactcccctcaagcccacctgctctggccatacctctgacctcatctagtttctctgtccagccctcctggcctccttgctcttctgggaacacagacaccttcctgccctagtacatttggactggagtttccttgcctagaaagaacttccccagacatcctcatgtccctcaaatctttcctcaaaggtcatctttgcaacaaggcacacattgacaactcctgtccaacagccaccttccctgtccccactgcccatacccggatcacctgcctcatggcacttaccaccttccatcactttcttttcttactgtggttatagtgtatgtatcgtctgcctcttaccactgaagcatatgctcagatatttttctgattttacttcaatggtgttccccagatgcagaacttttctgtcctgtgtctggctgacaacaaaggtcagttgaatgatcagtgtagagcacctcctactctaaagccagtatctttattaacatagcctcaggccaagtgctgttttgtggcagctgcagcacaaggtcccctcacactgacaccgaggccgcctgtacttttctcagcagggctgcttgtgtgtcctccctcccctatccctcctcccacaccaaccgccccgcacactgcagcacacgatcaggtttctctcttcaggaaggaacaattctagactatggacccaattttacaaacaaatacaaatctaaattaggctctgctttagattcatgagttgggattggagtcagcacgaagatcactggaatcagggaagggagagagggcaggagaccaaagcagaagaggagccctagaaggagggcaggagctgaatgggtctgaaaatttgtctcagaaagcacagggactcccgtgtgcaggggctgccctgggcgatgggtgagcctctgtggtcacagcttccgctggacaagtttccactgaagggacaaggacaatggagcagtgaaggtgacccagctgaggactgaccacataaagcccatgaagaactgaacagcaactaggcacaggccccgtccacactcggctcctcacagccttccccacccccacctgcaacagactcagcacagcgaacatgcaaattctggaaggttctcaggtctttatttgctctctcaacttctaggaattgacttatttaattaatccatcaacgcttcatagcaaatatttgagaacacaaatttatattcaggttcttaacttcattagggaagtaagaagttgcagctcagtgcaccatgaatttgagacagagatggagacatccagccccacctctctggaacaggaaagatgatcggggagggaacacaggtcagtgtggggacaggggtcacggtggacacgggggtgggctgtctctccacctcctcacattatgctaacaggaacgcagacacattcagacgcctttgcagaaagagatgccagaggctcttgaagtcacaaaggagaggtgtgaagaaatcctgcatctcagtcccacacaggcagctgtctcaggctacagaacacaatagtcatgaacaaattcaggtcagtcatggtaagtgatgacactctgaacggcccaccacacactcgaaacgtcccaatcaaagaatccccattacccaggccttttccctctgccccacccccgaccacttcagctccccagaatctcacctttacaagtgatgagagactcatcagagccctgggcactgttgctgcctggggtagaacaaaaaaaaagacctggtcagagcccgcaggagatgtgggacaagaggaattatggagtaggtgagctcctccacacgcccgccgccatcacttacacgcagcctgagagcagctccctccttttccacctgtgggaagaaaatgccctatgaggggactgggaggaggcagggccatgtgatcttaggggaacctcctagtcttggacccaagagaagtttccagaactacgactgcagacccagggcaggatcaggaaacatggggaaagcagttgtgggttctggaccaactgccctcctaaggtctgtccttagcagggaccttcccctgactcatgaatgctggaatcaggaccccaacaccataatcatcaaggtgatacatccgtccttcattgtcacatgtgcttcacaaaagagtaagtgctggcacacagggtcccaggctgggatggcccatgtgtggatggtgcttccagtaacaaggcggggcacacttctacctggggcttgaaactcccagtgggacaagaaaacccagaccccgctcttcaccccttccctacctgagctcttcctcctacacatcatagcggtgaccacagctccaaggacagctaggacaaccaggacagccaggccagcaacgatgcccatgatggggatggtgggctgggaagatggctctgggaaaggaggagaaggtgaggggccctgacccccaagcctcagccctgacccggctgaagggctccagaaggacttctgctttctctgataagagatgtgaccccccattcccctccttaccccagctcagggtgaggggctcttgcagcccctcgtgctgcatatggcacgtgtatctctgctcttgtccagaaggcaccaccacagctgcccacttctggaaggttccatctcctgctggcctggtctccacaagctcggtgtcctgggtctggtcctccccatcccgctgccaggtcagtgtgatctccgcagggtagaagcccagggcccagcacctcagggtggcctcatggtcagagagggggtggtgggtcacgtgtgtctttgggggttctgacgggaagagtcagaaaattcagacactttgcatctctcttgggacactccagcagcgcccatgtgaccatcctgagaatggacaggacacctggggtggggaaggcggcacagaacccagacgccagcctggacacaggcacctgggataatctcctattcattggaaagttctagtctctgagggaggaacagcgacttctggtcctgacctgagtggaggctgcaggactcagaaaagctggaatcaaaccttcagacacattgagtgtgaggcagagaacaaggcctgagagaaaggtcagcagcctgaccacagctgctgcagtggtcaaagtggtcaaaggagacccctgatcagtattccagggactgtcttcccctccatttcctcagagacttcatcccttaattgtcctagagagcagagggggccctcagaggaaactcaggaaaactcatgccattctccattcaagggagggcgatattccagtgctgatcccattttcctcccctcctcgtgggaggccatcccgggagatctataggagatggggaaggctccccactgcccctggtacctgcgcgctgcagcgtctccttcccgttctccaggtatctgcggagccactccacgcacgtgccctccaggtaggctctcagctgctccgccgcacgggccgcctccaacttgcgctgggtgatctgagccgcggtgtccgcggcggtccaggagcgcaggtcctcgttcagggcgatgtaatccttgccgtcgtaggcggactggtcatacccgcggaggaggcgcccgtcgggccccaggtcgcagccatacatcctctggagggtgtgagaccctggccccgcccccgcggtcagcccagtcccccgagccccgccccgccccgaccaacccgcggggattttggcctaaaccgaaaatgaaaccgggtaaaggcgactggggctctctccggtcgagggtctgggcgggttccgcagatccaccttggggtggatctcagacggggagactcggggcgacccgggccgtccgtgggggatggggaggggtcgtgacctgcgccccgggccggggtcactcaccgtcctcgctctggttgtagtagccgcgcaggttccgcaggctcactcggtcagcctgtgcctggcgcttgtagttctgtgtctcccggtcccaatactccggcccctcctgctccacccacggcgcccgcggctcccctctcggactcgcggcgtcgctgtcgaaccgcacgaactgcgtgtcgtccacgtagcccactgagatgaagcggggctctccgcggccgggccgggacacggcggtgtcgaaatacctcatggagtgggagcctgggggcgaggaggggctgagacccgcccgacccacctccctgcgcggctccccgggtcctgcgccctcgccgggcgggcccctcgctcctctccgcagaggccgcttccctcccaaccccgcactcacaggcccaggtctcggtcagggccaggcctcccgagagcagcaggaggagggctcggggcgccatgacccgcatctcggcctctggggagaatgtgagtccgggtgggtgactggggactttagaaccgggactgcggagacgctgattggcttctctagaacccgacacccaatgggagtgggaattggggacgcgtcatgagtattcaggaagaaggacccgacgcaggttgggagaagtgaaactcaggggagtggagaatccccaacgcggcgcctccccaatgcagacacggcccttggagcctgagaccctgagagccccgcccgggacctgggacttcgtcctgatccctcttctcctacaccaagcatctttgtcacactgtgtgcctgagtcctggacaaggatctgtctgtggaaaccagggagagaccccaaggctgcgcccagccccttccccttcacttctcctcctggaatccccgtccctgaactggactccctgcctcccaccctttgccttaccttacctcacctcaggtaatattaaactacatccagcaaaataaaggacacttacctctccccttggactcttgtacagggaaactcaccatggggaacttgatgccagacagtgagctcgccctgggaatggacgtgtagagtcaggagttttctctttaaacctggtgaagttttgtctgaaagcaccaggtagagattctcatagagaccagtttcctttttgtttattgatacagtaggtagcacaatattggtaatccctgaatgattagaattccaatctgtgaaagacctgtgtcaaaactgcattacaattaaattctcaaagctcctgttttactttcgcagactatggatctgtgactctgggttgttgcatttaaagttatcctcattctctagccagagtttccctgtgtgagtccagaacatctcctgaatacaaagaagcagggtttgttactgtctattgcaaccgggagcctgtagtcatcacctcaaagttgcgagggctccatgcagtcccaatgctcttcaccagcgctccagcactgcccgttttcgtgaactatgcacatctaagcagtgtgcatattttatttggacacttgatatttttgtaacccctttttaaaaaaaaatcataaggagcccattagttttaaggcagtcacacaaaatgtattaaataccgaatgcaaagaaccccctgccaggctcttctactgctttagaattctttcctctgctccttttcctcacctcctgcttctccagcccttctctctgcccctctcatccctcacaccctctttcccctttagtccccgccaccctgtcactcctgaattgtggcactaacactgtccctcacctcctgcccatgtctgttctccccacagtgctcagcagtcctgctaatgtgactcaggtcgtgtcatttcttcacttataatggttggattttggtctaccattttgctatacgttttcaatttgtctcgtatctttttgtttctgttcctcctttgctactttcttatgtgtcaagtaaacattttttagcttatggttttaattctcctagtggcttttagctatatttctttacattaattttttattgttgtaagaattgaaacccaattccttgacttttcacagtgaaattcaggtaatattaagctgcatccagcaaaataaaggacacttcaaatggtgtagtttcatttaaactatcattatgctattattattgtatatgttacatcaatatacgttataaactcaacgatacagtgtaatactttttgttttagacaagcagtcacgtatcttcaggaaattaagaaaatgagtgtgtatgtgatatgtgtatgtgcatcatttctgttgttaattgttcctttctgtatatctgggtcaccatctagtatcatttcccttcagcctgtagaacgtcctttaaaattacatgtagtacaggacccctaggaaatgaattttatgggtttgatgatctaacaatgtctttatttttgccttctttcctcccccctcccccccccctttttttttttttttttttttttttttttgcttattagggcgtttacgtgtaaaaaaattcaccagttttagctgcactttttggtggatattggtaattatttatagtgtaactaccacactgcccagtagagaaacaccaaatgcaaagatcctcctactaggcccctccactgctttagagtcctttcccctgctccttgtcctcacctcctgcttccccagcccttctctctgccccttatccctcagaccttcttctccccttacctccccctcccagtcactcctgagttgtggcgctgtagagaacagtttcttttccctaaaaactttctttatccccctttctatttaatccttgcctcccaccctcaccccttcccttcattcaaccactgctgtgctttctgtcactgcaatagtgacatttctagaatttcatggacatgcaatcatatgttatgtagtcttttgtttggtctctcccttagcataacgatgtttgagatgatgccattcattcatttttgttgctgagcagctgccgagtattgctggaatcccagtttattcattggtttctgtgtctccagttgatagacatgtggattcctccagttagggcttgttattaatgaagccactataaataactgcttacaagtgtggacttacatttttatttcttttggataaatacgtatttgtggaattgctgggccatgtggtaatagatgggtaactgtataagaaattgccataccgctttacaaattggctgccacattttttgcattcctaccagcaatatcagacattcctattttttccatattcttgccagtgttaagacttatcatatgtctttttaactttatctgctctaggtgatgtgtgatggtttctcattgtggttttaacttgcacttctttgatgactagtattgtttgctatcttttcatgttcatctaagcgacttattacatatattttatgaactattttgcaaattcaatgattaattccagagactttttcagaattccctagtgttttctacatatacaatgaagctggtgacaaagaaagactttcatttcttcctttcttatccattgatcttttttcttttaaaattattattatttggtagagatgaggtctcacttatcaggctggtctcaaactcctgatctcaagtgatcctcccacctcagcctcccaaaatgcagggattacaggcatgagccaccatgcctggtccttgttgcactggttaggatgactgttaggtgtttaaacaagaatgatgagagctcacatgtttgtttacaaggaacttaaacaaatttacaagaaaaaaacccatccccatcaaaaagtgggcaaaggatataaacagacacttctcagaggaagacatttacgtggccaagaaacatatgaaaaaaagctcacacacgtatatgaaacgtgactgtttataatcctatccaaaaaagaactgatttcaagcaacagcagtattacttccattcaatacttggacctgcaaacatcaaaaaagccactggagaaactgaacgactctctgaaagccttaaactaagatatgaagaagttgaaatctggaaaaaacttgaggaaaaggacaagcagggggaagcacagtggctacaacaaaaaaggcaggaaacaggaagagaggatggcagcacgttggctaaaggttctttggagattgtattggattccaaagacaaaacccaaaagagcaatggtgaaaagaatgaaaaatgtgagaccaaagagaaaggagcaatcacagcaaaggaactatacacaatgatgatggataaaaacatcagcttgattataatggatgctcaaagaatgcaggattatcaggattcctgtattttacattctctcagtgttcctgaagaagccatcagtccagtagtcactgctagttggattgaagcacacctcccagataattctatagacacatggaagaagagggggaatgtggagtatatggtacttcttgactggtttagttctgcaaaagatttacagattagaacaactctctggcatctgaaagatgcacttttcaagtgggaaagtaagactgtcctgtgcaatgggccttgggctttggttttagagggaggctataaaaactggttcctttgctattcccagtatacaacaaatgctaaggtcactccacccccacaacaccagaatgaagagttgtctatctcattggattttacttatccctcattggaagaatcaattccttctaaacctgctgccgagatgccacctccacctatagaagtggatgaagacatagaattgataagtgatcaaataagtgataatgatcaaaatgagaggacaggaccactgaatatatcaattccagttgaatcagttgctgcttctaaatctgatgtttcacccatcattcagccagtgcctagcataaagaatgttccacagattgatcatactaaaaaactggcagtcaaattgcctgaagagcatataatcaaatctgaaagtacaaatcatgagcaacagtctcctcagaatgaaaaagttattcctgattgttccgccaagccagtagtttcctctccaactctcatgttaacagatgaagaaaaggctcatattcatgcagaaactgctcttctaatggagaaaaacaaacaagaaaaagaacttcaggaaagacagcaagggaaacagaaagaaactgaggagggaagaacacgagcaaaaagccaaaaagaaacaagaagctgaagaaaatgaaattacacagaagcaacaaaaagcaaaagaagaaatggagaagaaagaacgtgaacaggccaagaaagtggataaagaaatctcagcaaagaagggcaaagaaataacaagagtaaaaagacaaagtaaaagtgatcatgaaacctctggtgccgagaagtctgtagaggacagggggagaagatgttcaaccccagaagtacagaaaaagtcaacaagagatgtgtcccatacatctgcgacaggggattcaggttcaggcaagccttttaagattaaaggacaaccagaaactggaattctaaggacagaaacttttagagaggatacagatgatactgaaagaaataaaactcaacgagaaccttcgataatagcacgaagtgaagaaatggggaggatggtaccaggactgccttcaggctgggccaagtttcttgatccaatcactggaacgtttcattattatcattcaccactaacactgttcatatgtacccactggaaatggctccttcatctgcacctccttccacccctccaactcataaaggcaagccacagattcctgctaagcaggatagggaaccttccaaactgaaatgctcttactcctccccagatataacccaggctattcaagaggaagccagcagtaactccaacagttaatcaggaagacaagccaacatgctaccctaaagctgagatctcaaggctttctgcttctcagatttggaaactcaatcctgtttttggaggttctggaccagctcttactggacttcgtaacttaggaaatacttgttatatgaactcaatattgcagtgcctatgtaatgctccacatttggctgattatttcaaccgaaactgttatcagatgatattaacaagtcaaatttgttaggggcataaaggtgaagtggcagaagaatttggtataatcatgaaagccccgtggacaggacagtatagatatatcagtccaaaagaccttaaagtcaccattgggaagatcaattaccagtttgcaggatacagtcaagattcacaagaattttttctgttcctaatggatggtctccgtgaagatctaaataaaactgataatcggaagacatataaagaagaaaataatgatcatctcaatgactttaaagctgcagaacatgcctggcagaaacacaagcggctctatgagtctattattgttgcactttttcagggtcaattcaaatctacagtacagtgcctcacccgtcacaaaaagtctaggacacttgaggccttcatgtatttgtctctactgatagcatccacaagtaaatgtacattataggattgccttagattattttctaaagaagaaaaactcatagataataacagattttactgcaatctttgcagagctcgacgggattcttaaaaaagaaatctggaagttaccacctgtgcttttagtgcatctgaaacatttttcctacaatggcaggtggaaacaaaaattacagacatctgtggacttcccgttagaaaatcttgccttgtcacagtatgttattggtccaaagaacaatttgaagaactataatttgttttctgtttcagatcactgcggtgggctggatggaggccattacacagcctactgtaaaaatgcagcaaaacagcggtggtttaagtttgatgatcatgaagtttctgatatctctgtttcttctgtgaaatcttcagcagcttatatcctcttttatacttctttgggaccatgagtaactgatgtaggcacataaggagacataggttataaactagttatcttttaaaaggctcagcaacacaattcttgaaatgcttatcaagataatggtagcaatagctggccatttagaggaattctaggacagtgggagctgtgttactagcactatataattcctgtcagtggtgacaaataacacttaacaagtattgcagtaagcatcacttacaggtaccatttatttcaaaacaacttttttagtctgctccaaagttaaaataattaactagctaagcattattattctactggtctaaaaacctttgtaccctttttttccttttcactgttacagccttttcacatttctaaatcccatcttcatatactatgaatactctagaatgatgtgaagcagataggaatgtatgtgtacatatttattgcatacttacacatcaaatcgatatacatagtttaacatgtggtcctttcgtgaaacttagaactcagaggattgcatttttttctttgagcatattttgagtaactgcagtgctttcttagggaaatgacagggcaaagctatttttctgttggctttgggggcatttgggtgcgctaaatctttatcttaaaaaataaatggaaacttcctttaattttttaaaatgagacattaaaatcttaatgagaaaaattaaaaaagctcaatatcactgctcattagagaaatgtaaatcaaagccacaatgagataccatctcccgccagtcagaatggtaattattaaaaagtcaagaaacaatagatgctggtgaggctgtggagaaataggaacacttttacactgttgttgggaatgtaaactagttcaaccattgtggaaaacagtgtggccattcctcagagacctagaaccagaaatactatttgaccccttgggtatctacccaaaggaatataaatcattctactataaagacacatgcacacgtatgtttactgcagcactatttacaatagcaaagacttggaaccaacccaaatgtccatcagtgatagatggataaagaaaatgtggtgcataccaccatggaatagtacacagccagaaaaaggaatgagttcatgtcctttgcagggacatggatgaagctggaagtcatcatcctcagcaaactaacacgggaacagaaaacaaagcacctcatgttctcattcctaagtgagagctgaacaatgacaacacatggatacagggaggggaacaacacatatcagggccttttggggagtgtggggggcaagggacgggaacttagaggatgggtcaataggtgcagcaaaccaccatggcagactatacgtatgtaacaaacctgcaggttctgcacatgtatcctggaacctaaagtaaaataaaacaaagcaaattaaaaaaagaaagcccatgtcttacatgtatgcatatgttcattgcagcactattcacaatagcaaagacatggaatcaacctaaatgtccatcaatggtagactggataaagaaaatgtggcaaatatgctctaccggcaggatttgatggcgtgatgtctcacagaaagttctccactcccagacatgggtccctcggcttcctgccttggaagcgcagcagcaggcattgtgggaaggtgaagagcttccctaaggatgacccgtccaagccggtccacctcacagccttcctgggatacaaggctggcatgacccacatcgtgcgggaagtcgacaggccaggatccaaggtgaacaagaaggaggtggtggaggctgtgaccattgtggagaggccaccagtgggcattgtgggctgcgtggaaacccctcaaggcttccggacttgcaagactgtcttcgctgagcacatcagtgatgaatgcaagagacgtttctataagaactggcataaatctaagaagaaggcctttaccaagtactgcaagaaatggcaggatgaggatggcaagaagcagctggagaaggacttcagcagcatgaagaagtactgccaagtcatctgcgtcattgcccacacccagatgcaactgcttcctctgtgccagaagaaggcccacctgatggagatccaggtgaatggaggcactgtggctgagaagctggactgggctggcgagaggctcaagcaccaggtacctgtgaaccaagtgtttgggcaggatgagatgatcgacgtcatcagggtgaccaagggcaaaggctacaaaagggtcaccagtcgttggcacaccaagaagctgccccgcaagacccaccaaggcctgtgcaaggtggcctgtattggggcatggcatcctgctcgtgtgggcttctctgtggtacgtggtgggcagaaaggctaccatcaccgcactgagatcaacaagaagatctataggattggctagggctaccttatcaaggatggcaagctgatcaagaacaatgcctccactgactatgacctgtctgacaagagcatcaaccctttgggtggcttcgtccactatggtgaagtgaccaatgactttgtcatgctgaaaggctgtgtggtgggaaccaagaagtgggtgctcaccctccgcaagtccttgctggtgcagacaaagcagcgggctctggagaagattgaccttaagttcattgacaccccctccaagtttggccatggccacttccagaccatggaggagaagaaagcattcatgggaccactcaagaaagaccgaattgcaaaggaagaaggagcttaatgctgggaacagatattgcaactggtgggatctcaataaaagttattttccattaaaaaaaaaaagaaaaagaaaatgtggcacatatacaccacagaatactatgcagccataaaaaagaatgagatcatgtcctttgcaggaacatggatggagttggaggccattatccttagcaaactaaggcaggaacagaaaaccaattaccacatgttctcacttataagtaggagttatatgatgagaacacatggacacgcagaagggaacaacacacactggggtccacttgagggtggagggtgggaggagggagaggatcaggaaaaatagctaatgggtactaaggcttaatacttgggtgggtactaatgggtacagaaataatctgtacaataaaaccgcatgacacaagtttacctatataacaaacctgtacatgtactccttaactaaaaataaaagttaaattaaaaaaaaaagaaacaaagaaactgcatatctggaaagagcatatggttgggttctgtgttttgttttttttttttaaccaattcacacaatctctgcccttcattggagtgttgattcatataggtttttttttcattattgataagttttaggtctaccatgttatttcctcagttttggtttctctgttcctcttgtcctgaccaacgacttcttattagaaaccatagaaacaaaagaaagtagaataacacctttaaagtgctggaagaaaaaaaggacaactaagaattctatatccagcacagatgtccttcaaggacaggcaaaataaggagatgtttcaggtaaaagaaaattaagagaatttgtcaccagcagatctgcacaataacaattggtaaagaaaattcttcaggctaaaggcaaatgataccaggtgggaaatgaggttatcagaaaagatgaagatgatcaaaaatggtaaatactgagctaagtgcaaaaggctatcttgttcccctcatttactctaatttatatacatagaactgtttaaagataagaagaagtttttttcttgtgggacttataacctatatagatatattacatataatatctgtaccataaagatggacattttatagaggataaatggttgcaagatttctctatttatgggtactagtacatttttaactgaaagtggactgtgaaatgttaagaagagttaaattctgaaggaaattgagacacaaaaaccattcaaaagattaacaaatctcatgatggttttttgaaaaaaacaaaacaaaacaaaataaaaactaaacaaaaataaaaccctagccagtcttgagtctcatcattctacgatttcagaactattgtgaatacaaaagtaatcaaagaacagtcctgcccagaaagaggagttatccctaaatatggtgtccctggaacaggtggctctccctgctggacctcttccacgtgggtgctttctgcagtgactttgttgccttgctattccactttacccagtgtcctcacccaagagacaaggggtgtctgctgctgtatccacacttggagaaagaaaccttgatagtgtcagtacattacaagctgggcatgacagctcacgcctgtaatcccagcaattcaggatgctaaggcaagaggattgcttgagatcaggaattggagaccagcttggacaacatagtgggaccctcgtctctaaaaaaaataaaaatcagtaaacggctgggcctggtggtgggcgcttgtatttccaggtattgtggaggctgaggtgggaagatcccttgagctcataaatacaaggctgcattgagctacgatcccaccactgggctccagcccaggccagagtgaggtcttgactcaaaaaaatacattgtaagcctttgctcactatgggttatttattatttattcaatgtgtattttgattttattttactggcagcacaataaaccaggacatgctgaaactagaaatcacatccactttccagtgttaaaaagcccagtctagggaggtgagaaggagacagtcctcattagcgttgaggattcagggagatcgagatgggctgggcaggaaggttcttacttggaacctggaggatgagcaatgacattcctctctccaccttaaagctcatcctgggcatctgcctcctgggagcaggagcactgcaagctccgcctcccgggttcacgccattctggctcagcctcccgagtagctgggacaacaggtgcccaccaccacgcccggctaatgttttgtattttttagtagagacggggtttcaccatgttagccaggatggtctcaatctcctgacctcgtgatctgcccacctcgacctcccaaagtcctgggattacaggcgtgagccaccgcacccggcctctccttgggatttctttactggacaccagcctgagtcaactttcctgtaaagcaaaagaagcgtgaggttgctaaaggaggaatggtgtgatctccacctttggcgagatccctgtcaccgtgttcaggcgaagggccaggccttactccccatgcagagaggaggctatggccatgaagacgcctgtggagaagtgaggacccgctccctctacactgatggccaagagcctacagatggcggagaaggcttcccttcagctgtgtcctatcaggttcttccaggagtcaaggagtagacctgcatgttacctctggtgatgtaagctgcatgcacacctagaagtgaggtcacccctgctgggggtcctggggctgctggttgttctgggtgctcagtgtccagaaaagaagatggggaggaggctttgtgcaaaacagtaaccatactctataaattattttttcattagcctttgtgtcataaaataaaatataggactccaaaagaaaaaaatgtctaaaatttgtgtcctttaatacaaagtaaacacccattaatcaccagggatagatgtttgtggggcaaaccagaagccccatcatttgctccagcccagcaataaactctttcttccctcaaataaaaacacaacctgacttttacgatcatcaattctttgttttatttttatttttatcatccaatattatgatttagttttacctttagaaatatgcttttgttttctttattctatagattcttccttgaaatttatattgtgtggtagagcttcccatagtgtgcattttgctgattgctccccaaggcatagtttaatatgtatttctattatctgtattgcctctaaattggtaattggctatggagatcagcttctattcaggcttggtttctttttcacttggacttgtttgatggtgctgtattgtgttcttccatcaagaggaagaacctcacattagttttttcttttattgtgttgttaattgccattgctattcaatggctaaatctgttaattcatgatgggttgcaaaagagttattatagtctcagtctctcattccttcttcatttattatctgaataatttctaagtaagagattcaccctcctctactgtttgtttactactagaaacttggtttttgagagactaagccaatcatctactcacctatgatccagcaatagcactcttagttctaaaccaatagaaatgcatgtatgtgtgtgccaaactatatgaaaatattattcatagcagcacgatttgtaaaatctgtatacaacaaaattgtctatcaacagtgaaaggacaagaaatgtgagttatttataaagtggagcattggacagccatgggagtgaataggctacgaccacacacagcgagatgatgagacccagggtcatgatggtgactgtataatgccattcaactagacctggcagaactcatctgtattagaaatcaagagtggctactctagggtggggagggtggtttatgactgagtaggacccaaagatgcccgcaaagtaggcctctacattaaaaaaaaaaagagagagaaaaattaaacagagaaatttaaaagtttataaataatgtttacttgtattcaagaaaattatagcgacagccgccagataatgatcagctctaaaaagagaagctcaagaagctcatgccacagcagctggtacagctgaggagatcagataaaccagcacaagcatggtcatgaaagggagctgcagacatatggtttccagagtttcaaaatccatatgactaaaatctatgtgatgcgtattatatgatgactgcctcaagacagacaggtgtccacttagagacacagagctgtgacttgcaggggctggttgattttctcagaactcattaacctaaatccattagttaccatcctgtttccactcctatcatcacctcagacaaccctgcgtttagctcaagattcttcccttcatcgtaactgaaagtcactaatgactgcaatcaatttgaaatactataagtaggtaagatttcctcagtaagtaaatggtcttagcatatttttgaagtcataactataatcaaagcctgggacatttatttgctctaaacaagcagttattcttcatccagaattacacaatagaagctctcattcttgcatttcccaacagtttgccttagccaggaaaataaaccccatgggtctctagcatgaccacagtgcaagaataaggggaagggcagaggtgagaactaagtgctcttctacagctacgggtctatcaaggtaatcttgagaggtacttatcaatatgtgatgtgccagcaacaacatgagggaagataaccacgtgtttctaggataaggcaaaggccctgctcatggattcatccgtaatctgaacacagcacatgaagagtgaacagctgtcaatatctactttcacctcaatgtaaactttcaaaattaagaccaagtggagcacggtgccctctgaagcactgtctgtcacacactaaggagctaagaactcctgtggcctcctttagaacacagctcttccaggacacacaatgagcaggcctgctttagcacccagggcccacatgcagctgctctgcccagagctgcccagctcctggaccactcacctctgctcctgctggctggtgcccaagctgtaagggctggcaaatattttgagtattggtcccaaaggcccctgaaggtgaaaggatcttgttcttcattttcattacttctaagcactgagacctcttacaagaatcatccacaagcatttactaagtgaatgttcacaggaaacccttcctgaaaagggtccttccaactttacatttgacaagtgtgtactaaggcaataaaactattcaactgagcattcaaattcacacagaggataccacgccaagaaaatgaaagcagaaatattggattctccttatttgttaaacctttccctctagaaccaacagcttttcaaactcataaaacaccccaaaacagtaaaacaatatcaattactcatctgaagatatccacctgaaacacagttattaatcttcaaaggcctagcaccaggcagcttcacacagcacatctgcagaattgtaatgatcaataagagtaaacccaaagtacactaaatactttcatggcctacaggaaaaaaaaaaaacgctcttttcaggacgatgtaatagttacaccctatttcttcatgtgcagcatgatattctatgcttaatggcatttaaatgttacacagtaaatactgagaaaacccagaatttttggatgtgcagaagcaatatcacatcattaatacaaaaggtgctcagctgcgggattataataccattgagtgctgagaccacttgaaatcttaagtacattcttagcatatggtctcctggctgtcacccagcctggtaccagctacccacctgttgcatagagctagccccagcactgccttggttgggccggttgtttttgtcaaactctaagtctccctcagaatccctgtacttctccactgcaatgtattgacagggttgtgaccttgtccttcccaaggggctcactcttggcctcttgctcacacagatcctgcaccttttccagtcaaatccccattccagtagcagcaaggagatcacttctcgtatcactttttggtggctgtgcaggttcttgacactttgcctcagctactggtggtagtgtgggggcgaatgcatggggaagacaaaaaagaagaactgagccaagaggcctggtggggaaagtgtgtggctggaggagggaatgctggacccaggggccagtggagggagggtgaggaggagggtgtgtggagccagctgatatgaggaaggaggcggcaggaggatttgcagaaggcaacaaaggcagtttgtactgtaaaagggggaagagaaggaggtcttgacgggttgtaatatgcaagcacctgtgctgggagcatcctgtagtctcctggagccataagtgcacaggattggaacacagctggggtaaggcagggaagtgggggccgctcttgaggtccatttagggccatgtgcctcactgaggcagaggaggggtggcactcaagctcaggggcctggtttgtgggcccatgtggacatgcatcttcagctgcctaggaagggtcgtgagaatggtttggagtagctcgataagagcatccctaacatccattgtatgggacctgctgtctagggacaggggttcttgcaggatgctccatggtgcacactgagacaacctgttgctgggtctaagctctttgtcatatgccatcatattccactcatggtgcttgtttctggcttttgtaatccttttcacatcataagtggtgccatctatgtggttttgctacttttgatgccttctgtctttccttttgtcttctgtgtcctgcagcacttcttctttccagaggtcaaataaatgggaaggatcagtatagaacttcagcctgtctttatcatctccatgtgctctcatgctattcaggggaggtggtcaatcactctgattgtaaatgtcagcagcaggagtaggaatgctgctctttgaaactgcttgctggtcttgggctggggaacttttgagggctttttccatgttgatgtcctgtggtgacacctcttccactgctgaatccagctgagtgactttgaccatgaggcaacaaattctaagagaatttgatctaatgtggaagtagttagcctccttaaatagctcaccaaatatgtcttcagcatgtatgttcagattgcttagctggtgcgtaatagtgacaagattgttgttggttacactttcaagtcactggtaatcccttcaggcagagttccctggtgcaaatgctgggattagatgctcctcttcacgggaggcatggcttataatgttctaattgactaatggcttcagaaatttcctcaggaagcatcaccactttgattcagataccagcagtaactgcaatcaaaattaaaatgatcagtcccgctgatgtagaggcagagattgcactggtagctccctgatcttactccacaccagaacacacatccctggggctagctaagttgcctcaggccaggccaaggccttggtcaccctatttgtaattttctctgcagttattttgctttcatttattgaacaccttagatatgagctaaaatcccccaccaaatgtgggaaactttcaactattattttctcaaatatttttttctgatcctgtgtcttcttttgaggatccacttgcatatctggtcacctgctttatattctctgatgggttcatgacgttctcttcatttttttctttaatcttatttcaatctgtgttttggattttagaattgagcacattctggagatttatattcaaagtcacaggcttgttctttattctgccatctcaaaacttctgtggacctcttccagaatactttcattttcttttttttctgtttgagaatttccacttagtatcttacgtggtttcagcaggggtttctgggtgtgtgtcctgcatctgtgtaatttagaggttgaccaagtatttgggtcatttatactcagattttgtgattcaacttcattgtggttgctttgtttctggaattctctttgaatttccaattgttttgttagactcaaatcctgccttttcacctctcaagccagtaagatttttgctttcttctactgagctctgtgcaggttggcaaatgcactcagtccatgttactgaagacttgcagatcttaccaggatcatttatctctttggagggtagacctccctctagtttctttctggtttttcaccagattcccaagtggcccacacccatgcagagtttagtgttcaactagggatgagcataatttgcattcacattgttgatctcaactcttctgcagctctctttcaacattctcatttacatttctagctgatttgggctctgaactctataaactgcccatattgagccactagggctgcagttatctgctgggaggctgaagagcactcataggtaagaaggaaaggccaccaacttgcagtccttacctaagacagaaggagtcttaaacaagaaagctcttatcacatattgcttgcctttgttaattttccagtgacttcaaatgtttgtttttagtatttagtacagttttcatgttgctgttggaggaaaacttgctggtctatctcttcatgttgccataaccagaagttctaccctgaaagagacttttgggagagaaggtcacagtccacaattcaatcttctgagacaaatatggatccaggcaccagaaactgtcaagttagatttctaaaattaaaataagattagagctgggtgcagtggctcatgtctgtaatgccacaactttgggaggccaaggtgggtggattgcttgagcccaggagttcaagacaagcctgggtaacatgacaaaaacccatctctacaaaaaacacaaaaattagccaggtgcggtggcacacagctgtagtcccggctacttggaaggctgaggtgggaggatcacctaagcctggggcggtcgaggctgcagtgagttgtgttcgcaccattggactccagcctgggcaagagagtgagaccattgtttgaaaaaataaagattgaatgaataataaaagaagattaggcctggcatctgtgaccccaaggttctatgggaatcactgacttcatacaacctacaatgataaagaaggacaccctacatatatatgactggcctctttagtattggagagagcacattccatagctcataactttccgacagtctgtgaatcaagtcaccaaaactgcagctaaagttgaatggaggccatggaagtagttcagtgaagtacaaaacaagcactgcttttgttcttgattctttccccaaacaatgcactcacatgtttttaataaattctacagccggttgtagctattggcaatgagacctcccattattgaggccctggtctttttaacttgaggaattccagcaaatctaaggagtacaagctctttgagaaataactgcatgatattattaaactctaatgaggacagatgatttcaccaatgaaaaagtatgacttcatatcctgcaagggtatttctctaatccaaaatcctatgagctagtacaagtacagaaacattccataataaatggaaatgtcattttgatccaggcaaaagtcaagcatatctgccatttggccctaaatgcttatttggatattgttgagtgtgtgtgtgtgtgtgtgtgtgtgtgtgtgtgtgtgtgtgtttgtgtgtggcagtcataggactcattgcccaagtttcagggtttggggaaaaagttccattctttttctgaatttgagtaatagcttctggcttactactgggccctggtagattctgaattctatgatcatgatacagaaaatgaccaagtgacttgagatgcccattatgacctgagttttatcgggtcactcatgctcaccagccctcagtctgcaaggggaaatggtatacacagcatcagactttagcaggttccataaggccaggtaagttgcctaataatttgtactatactcctaatgttcttattaccactggagagtccactctcccttgtctcattattgaggtcttgaggagttccctaaggacaactgactgtagaaggaaaaaaatttgagtatgcttggataccccagagttaactgtcagggcattagagtctctttcaggaatcatcattaagagtaatggaaataaaaatacttccagtgagaagatgttcaattagaccatctggaagtgcagtttaccaaaaggagaaacgtcttactgttgggtcctaatcaatgcacagcagtagctagtagtttccttagatagtcagtgactttaaaggaataagatggtaaggtttgtgataaggagcgttggggaggagatttgaaccactcacatggcacatttaggtaaacatacctaccctcatgctaacaaaaatggatagtgaaaaaataaaacacaatgtagaagcattgagaggcttaaactttaataaaaattgtcaaatcctaaatcacggaattgtgcatttactttttttgctgagcttatttacttaatgtaggataattaaggtttagttttcatggcctcctaaggcatttggaatagaagacagagttcaggtagcactcagagtgggaaatttaatagagtgttctcctcatttcaccaggatcccaaagccagctcctcagtataaggaaaacatccttgcttgaaggtctccccagaaagtcaccttggtgctgagtggagaggggcaaaaccttctcctgagattaaagagaagtggatttgcagcccgagttcacactccctgggtggtctaaaaatcatcaaggcatgaatttattttaaagtagtgcagactccaaggaaccttggaaaatcaagcaaaacttctctgaaaaatttctactgtcattggcactctgaaaattccaaaaaatcattacaccagcaaaaggagcacttaacagttaagaacaacaacagagaacaatgttcataagagacaaagcaccgtgaaagaacaagaaaatacaacagacagcagaatcatacaatcatataactgagaaatcagaataattgtataggatataaaattgctaaatgggctatgattaaagaacagattgttaaatacatttagtgactataaaactataaataatcttcagaaaaatttgaagagacaaacacataacacttaagcatgaaaatataataataaaatttaaatctcaatgaattttgaagacaaacaatttaacacaaacacacctagtaaagtacaagaagttctaaagaatgtactttagtcacaaaaagatatcccaggtagaaagtatgaggtgaaagaaaaaaacaaacaaaaaataaaggtaaatggatggttaaatataaattgaggtttaaaaggatagtgtatatattgagaatctataaatattgttaaatgaaatacaaattattttatctttttccaggtctaatgttggatttcttttcttcatattctgattaaaatttcaagataaacttctcactcataatgtgtcccattctggttttgttttgtacatttcagtataatgcatataaaagaatattctgcgggtctttttatggtatctttccaagctattgttggattgtccagtacttcacgttctccaaccttgtaagtaatgaatgtacaagttcaactgtacatttttactagtgggcagttttccacaatatgaatgccattcatgtagttggcgggacctgccagtgtatctttcagaaccacggacagatctacatgttctgggatgtagggagctagagtgctctctcaactggatgcaatggaatgccagggaggaaagtttaagataaactctagtcaccacggaattgtgatttttaagcatagtaagcatagtctgaaataccacattctttccaacccctctctgcacccaatacgtcattagccctgtattttatactcactgtcataaaagaacctgttggggaaggggaggtagctttaggtcagtcttggtacaatcatacagtggctaaattagtagatctagtgtaaaatggcctggaactgaattctagcctcatatcttcaaaattatggaactttgggcaagtaacttaacatctctgtacctaattttcttgaacaagttacagtttacagatttcatttatttattgtggataataacatccttctcatatggttgtgataaatattgaacaaaataatccatgtaggtacaaaaaccagtgcctgaaatatagcaagagccttttaaatgcagccattattgttattatggttattcttattgtcgtttttcacagaataccttctggttcccacacaggatctctgaggacctgttggatcagcagctcttttgtaagattcgttgatattgtgaaaattctctaatcacagcccagctacaattttacagaagttcccaataccttatctgaaggtttcttacagtcagattatgagtcttggttgaaggcatcttctggagtcatggtaacactccgggtattctgggaaaacagtgatttcaaaatacagtttgtcttgttgagactaggaatttggaaaattccagtctgtgaagtgaagggagaggagatacttccttagcaggaggaagagaatgtaccaagtacagggcagttaaagaaatgtttgtttgatttttttgccagtggttatatctgtggtttcattagttaaatgccttatgtggtacattcttcccaataagtatttttaaaagcctctgaaaggaaggagctcttgctaccaccatcctctcagtcaagtgggaataatctggtgagcatagcagatgccaatcagttcataaaaagctcaatcttcaagtttgcagaattaattctaaaaacgagaagagtattggacatagaatttgacatatatgttgcatgcagaagctgatattttagctttatagtttacaggtccctcagaatgttttatacttttttatcataactgggaagctgtcactttaatctttgagtaggactaaggtatgaaaagagcaatgatggtgtgctcaatggctatattactaaacacaagaatgttttcagctcgatctacctgagctacatggagatttgataactaaatataaagtgaatggagataaatgccttacttaccttctgcagatgacaccttctagttagcaagtggcagatccaggactactgggctaggaagctgcttgggctggagtacaagggcagtttcagggatagagaaattaacaggcagagagggaatctctgagactaggaaagactaactgcagctgggcctagatgatctgagatccaaatgtagctgttgatcttaaattatgcaaagtagcaatggaactgtcagtcagtcagcatgtctagctagtcagacagatcaggagtttaatcactgacgttatgggaaatcagaaaactctgggatggctgggagaatatgtgcatatagacatctgtagagtgggtgacaaataaatgaaaccacctaaatatttaccccaggggagtaggtgcatataacatactatggaacagcattaaaatgatgagttaaaccattttttctgtgaaattcaaaggatgttcatgatataatagaaataaaaatatcaaatggtagggcactgtgaatacaatgtaatttttcaaaagctacaatgagcaataagatgaaataaaagtcatctagattaaaaagcaagaggtaaaactatctcaattgcagatgataaaatcttatatagaaatacgaaagaattcactaaaaacaagcttagcaactactaaaccactaatactaaattagtttagcacattggtaggctacaagatcaaaatacaaaaattgagtgtgcttctatagagtatcaatgcattaatacaaatgttatttaaaaatccaacttacaatagcattaaaaacaatgaagtcagaagaaaattgagggcccagcaatactcttcacttatatggttaattggttttataaaacagtgctaatataattcagtgaggggaagaaattatcttttcatcaaacagtgcagaaacaacaggctatccctatgcaaaagaataaagctggatccctacttcacaccacatataaaaattacctcagtgtatcaaagacctaaatgtgagacttaatattagagaactcttagaagaaaacataagcataaatcttcatgactttggattaggtaaaaatacctgatcttaaatgataccaaaggcacaagcaaaaagaggaaataaaagataaattgaacatcatcaaaattaaaaatgtgtgagtctaaggacaccatcaagaaagtgaaaagaaactcattgaatgggagaaaagttttgcaaatcttatatctggcaaggaaaggacttgtatctagaatatataaagaatggttgtaactcaatataataatattaataataagataataataaacaataaataataataataataagacaaataatatacaaaaggcccataagcacatagaaacatgttcaacatcattaagcatcagggaaatgcacatcaacccaaaaatgagatactatttcccacccactagaatggctataattaaaaagataataattagtgttgatgagaatgtggagatactagaatactcacactttgctggtggggatttaagagacatagcccctttagaaagcaggctagcagtagctcaaatttgtgaacattaagttattacatgacccagcaatcccctcctatgatacagtatacccaagagaaatgaaaacatgagttcacataaaaacctatatgccatgtttatagcagcattattaatcacaatccaaatgagaaggaccaaaatgtcaccaactaataaataaattgtgatatatccatacaatggaatgtaattcagcgatgaaaaagatgtgaagtactgatacaagctacgacccacacaaactttgaaaatgttccggtaagtaaaagaagacagacacaaaaagccacatgttgtataatttcattacataaaatgttcagaataggtaaatctgtagagttaaaacataggttggtagtttcttagggctggggtttggatatggatttttctgcagggctgggaggagataaaaggatctgtaattgattgtggtaatggaggcacaactgtgaatattctaaaagccactgaattgtatattttgaatgtgcggattttatactatttaaattatatctcaagttgccctgaaaatgattaaattacatataaaacttatagtcattacagctcaacaaaagctaccagataaaaacactcactatggtttgcgtgcaagtgaagaaagtagacatgcagagagtaggctgatacaatagtaatcaccttagttaagtgggtttggatttagtgaaaggagagatttaaaagtatatttatgcatattttgattgtttcatttcctactgtgagcaagaattatttttacactaaaatttaaaaaatagaaagttacaaatcttcaaagctctgcagtcaaataaacatagtaacaagtgataatgagctgtctggaatgtcttcctagagaactggctgaagcacatgcatgcaaaaggaaggcaatggctgaagaatcaaggcagaactacagtggtagaagagaagaaaaatgtaaacatggagatataagacaagaagatgactgatgaaggaagtggacatgaatactgtgaaaacctcttggggagtcagaaatgaccgggtctacgtgggagggaaactggattacagcccaagatggccagccatcagggacagtgtcccgaatcagattctgtcccgaatcagaagggctgtctaatcattccctttcttttccttccaacaccccagcaagattattgcctaatttacagccatgcacgttgaagaatcagtacaatttggagactttgagacaacagacagaaaatttttgagctcctctgggcattagtgagctgttttcagaaaaacagactcactctggtatttcaggaataaatagaaataagagcatacactaatgtttggaaaccacgggtagcaaatattggtgaagtcatgtgacaggcagaataacagtctcctaaatatgtctgtgtcctaatccctggaacttataaaaatgtctcctaatagggcaaaaggaaattttcagatgtgattaagctgaggctcttgagatgggaagattatcctggattatctgggcaggttcgatgtaatcacaatagtccttataagtgaaaggagtagaaagcagcatcagagttagagctgtgacaacagaatcagaggtcaaagtgatgtgactgctgacttggaagatggaggaagagaccacaagccaaagaatgcaggcagccccaagaagctggaaagggtgaggaaacagattttcctttagagcctcagaagaaatgcagctctgacgacatgttaattttagcccatagtgacacatttttgacttcttacctccagaactataagagaatacattggtgttgttttaagccacatagttgtggtaatttgttatagcagcagcaggatactataataataccagtcaccattggagctcctggaagctgcagtagggaggtcagggaagcatatactgaagacttcagcttgaagcatggatgggaggttctcagaatcctgctgcgagattgctatattctccagaacctatgagaaagctcttatcactcatcttagtccacacaagcaaagcaggtgggtctctagcctagcagggaagccactgagaacctgacatctgcctgctcctctacctgcagccaccactgatgggtacaggtctgtcccaccatctctccagggccccatttcttaggcaagtctctctcactggaaaatgtaaactggaactatacagggaaggggatcctgggagatatagtgcctggcttctcctctgcagagaagatgctagaggggagatgaggtgatactgggtttttaacaatgcaacacatgagttactaacagtgaatgaagggggactggctgacctcagtttgacaagcaatgtgccattagatgatgcaaaccattggtatatctatgagatttagtagttttagcaagctatttattggagcaaggatgtatcaaaaactatgaaaagtgcaggtttaaaaaatgtacaaaaaatttaatggactacacaaatgaaataaattctttttttaattatacttttaagttctgggatatatgtgcagaatgtacaggttggttatataggtacacatgtgccattgtggtttgctgcatccatcaacccgtcatctaggttttaagccccgcatgcattaggtatttctcctaatggtatccctccccttgcccccatcccctgacagaccccagtatgtgatgtttccctccttgtgtccacatgttctcattgttcaactcctgcttataagtgagaacatgcggtgtttggttttctgtttctgtgttagtttgctaagaatgattgtttccagcttcatccatgtctctgcaaagcacatgaactcattcttttttatggctgcataacattccatggtgtatatgtgccacattttctttatccagtctatcattgatgggcatttggattggttccaagtctttgctattgcaaatagtgctgcagtgaacatatgtgtgcatgtgtctttatagtagaatgatttataatcctttgggtatatgcccagtaatgggataaataaattattaactatgctgctattttatttatttaaaaatgtgagttcgtggtctgagtaatttacctcagtatgactcaagaagggcactggaagtccgttgatctggccagaacagaaccacatatatgaatggaaaaagtggtcttgtgtctgccaatcccaggggcttacaggatgctgtctagaataggctggctacagcaactcctagttaagccagaagtttggaatgagttcaattttgggggattaaattctaatgagaggcagaaaacaggaaagtttatgcttttccatgctaatcaatggccccataaacattttcttgtatatatttttgtaatttcaaaaaactcaagtgttttatcagtaatttcttagaggtgcacacagagagagatgagtataattgtgaagctaagttttgtaaagcacagggatggctaagaatgggaaggaactgatcccagaatcccacagagttaaccagtaaccctcagcccaagtacgtgatgaccactgttgagcttcaaaggaaaagcggccatctgaggagcaaacagaattgcatgaagaataagagtgcagacggtgtcctaaatacagtgctgagattcatgtagaagcacaggaggaagcaactgtgtaagtatccagagtcctatgaagtagggatttcaatcctccaagccaccctctcccatctgctaacaaggatcaaggcttttgtggatgtaactggctgtggttgatgggaacccctgtgatccctatggggttacacatagcttcggagaggggaatgaacacacacacagcaaagggaaaccatctgggcctttactgaaaccactggctgacccctgggttaaagtatgtatgttctgagtactgatgttaattacatacagacattgctcagaccccatgtcacctcacactgctggaaatttgccttgacctcgactctcaccaatgaccttatgggtagtttctatgaccagctgacttaagaggaaaattctgagcttcttcataaacatgccagcttagtgtgttggtgtgaggcagcagtagagtgtgtctgcagtgtgggcaactcaggaatgagcagagacagtgctgaagagggtcctgccaataggcaggtggggctctgatttgcccactttgtgtagacagaagtggcctgaggtgagaacatgcacagactcataggcaacggcaaatggcttaaatagcgggtccggggcctggaaggagcaagataggaagatcaggaacaggaatatctggaaagaggcatacagtagatacaaagtgcttggatcttttgtatcagatgttaatactcagcaaaaattaccctctatacaagtagtctaaacaaccaggtgtacaggatgaatcatttggtacacatcagccagcctctgtccttaaccatcccagtgctcatgaaacaggctcttgaaagcagtatctatggtggaagagatgcactgtgggtgggtcccaaggcttgggctcccttcagcatggctgacgtggttattgtcacaacctaccttccaacgataaataaactccaacagattacctttgcttatggaggccaatgagcaatttgatggcaaattgattctactcttactttttcacaatgaaaaaggcaggggttctgtcagatttagcttgccttgtattagcggtatgagtttgttctttcttcccatagtgccacactcagaaacgttatctaagggctcacatatgtatgatcttctaataggggaaccacataacattgccccagactaagggacctactttatagcgaacgctgtctggtagtgggcacacgaccatgagatctcctggttctaccccatactgcatcacacacgctgccagctgatagagcagtggaatggtctcttgagggtgcagctgggttttatcttgaagatcacatcctatcaggatgggtaatgtccttcaggatgaagcatacacttaggctatggcagcagctgttacatagtgccaagtctccaacaggtagagtaagtaagtctctaaccaccagtgctggaagaaggaatgactatactcaccagcacttccggtaacccgcgtggggtgttggtgcttcccatcccctcaacgtactcagctggtctaggagtttgggatcccagagaaggaagttcctaccatggaacagagtacaagttacattacgtttaggggtatgtttgttacctgttcaatttgggttcctcatgctaggaggctgttgggaaaaggaggggttactgtataagcagggataattgatcgtgattattatgaggagcagaactttaatttctgtcttaatttcttgctgaaactggtaacagtggttgcatccaggcaaggaatttggaagaattgtggatggggtggagaacgaaatttgctttgcacactatacacatttttattattataatcttttaaatattgttcttgtattagctattcaaaataaattttaaattacaaatcaaccccacatttatctaaaaaatttttttatttcaatagtttttgggggacaggtagtttttggttatgtgtgtgagttctttagtagtgaattctgagattttggtgcaccatcacccgagcagtgtactctgtacccagtgttgccttttatccctcaccctattcccaacctccaccaacaagcccctagagtccattatgtcattttgtatgtttttgtgtcctcatagcttagctctcatttataagtgagaacattcagtatttggtttttccattcctgagttactccacttaggataatggcctccagctccatccaagttgctacataaggcattatttcattcctttttatggctgagtagtaatccatggtgtacatacaccacactttctttagccactggttggtcaatgagcacttaggctggttccacatccctgcaattatgaattgtgttgctataaacatgcgtgtgcatgtgtctttttcatataatgacttattttcctttgggtagatacccagtagtgggattgctggatcaaatgatagatctagttttagttctttaaggaatctccatactgttttccatagtagttgtactaatttacattctcacaaccagcagtgtaatccatccatgccaacatctattgttttttgactttttaattaatgccatttttttttttttgagacagaatctcactctgtctcccaggctggagtgcagtggtatgatcttggttccctgcaacctccacctcccaggttccagcaattctcctgcctcagcctcccgagtagctgggactacaggtgcatgccaccacgcccagataattttttgtatttctggtagagacagggtttcaccgtgttagccaggatggtttcgatctcctgatctcgtgatctgcctgctttggcctcccaaagtgctgggattacagacttgagccaccgcgcccagccaaattaatgccattcttgcatgtataacgtggtatctcatggtgaaccccacatttatttagcaaacatttattaggcagttactatgtgtcagggtctcctaggcctcaatgagtgaaacatcaaagattccacaaggggactaaaaaaacagctaaatgcaggctactataattagtgcgggaaaactgcttccaagaggatgcaatgtctaaacagagaactggatgaggaacacagttaatccaggtgaatggcaggagaaatcttttagggaatcagtatcacaaacaaaggctcagaagaaagaacacacagggagtctgggggaactgtcagcagttcagggtagagattagagaaagaggagcacaggggcaaaaagcaagcttggagcagtgagcagattcaatgactaaggcttgtggggttggggagaacctttggcttttatccgaggacaatgtgcagcactggcagcactgaagtcaggaagaaccttgatcagatctgcattccagaatatcactttggtgaagtgtgaagaatgaactgagagatgctagactgaatacatggagaagaagaggttcggggaaaccctggcaggaactgtagggagaatgttaggatggaggaaaaggtagaaaggaccctgagagatctgagtaatcaagacccagtgtttcacacatggaaaatgaggtggaaaaggagaaaggtccccatgtgaacagcactccatctggaaaaatgacataaaacaagggaatttggcccatgacataagaggtccttgggctcacatggtattgagtgatcagggaggagtttagttgagttcacctctacagacaggtattgagtgccaggtatgctgtcatcagggtcataaggaaatcaaaggtatctgcctcatatctttgtgacttacatgtctgatcctgcttaagaactatgccaatccccgactttccaggacccccagtaattttgtcgtgtccatgtgggaagtgagctgaggcttggcaagaggatcttagcccatatggtccaaaaaatagtagaaatatttctttagaagacacaaattccctaattaaatggactaatttatccatacaagagaaataaaatcactaaaaaataaactgagtgaaggaaaagaaatcaataaagtgtaattaccagaagttcgtgggattctgcatgaaaacaagcttgaagaaatagtgaaagcagaagatttgcctaacagtatgacactcgaatgaaaaaaaaaccagataggtttagtggtgctgcttctttacagatgcaggaggtttgaaaagtaatagagaaaaacatttggagagaacgccatcttagctttcacacagaatgcaagaccagcctttccagtgggcgtctcttgatttttgtttccagggattcgatttcataaacacagctcagctctgcagatcatctggcccagtccaggacccgggtttgtaatgatcttgttcagtcatggtccagcctgtgtatagagaccctaagatgatgcccggtgatcctgtctcttggcatctcatccagctgagaaccgatggggcctaaacttgcttctaaccaatagaaagtgacaaaaatgatgtcacttccgtgatgaggtcatattacagccgcacttctgtattactagatgactctgtcttctaccttctttgtttgcaagttttgatgaagcagaaaggcccatgtggcaaggaactgaagtcagcctctggccaccagccagtaaggaactgaggctgtcagtctaacaggcatggaggaatgaatcctgccaacaattgcttgagcttggaagtggatccttccccagttcagcctccagataagacccagccatggcactctgatgaaaatcatgtgagaaagctgcatagctgtgtctggattcctgacccatagaaatgtgggataatacatgtgtgttgttgtaagctgctaagtttgtggcaatttcttacatagcaatggatagctgaaaacacctcccacagctttcactgagttaagcgacccttggggccagttagaacttatctcatccccttccctgtggcagcccttatctttctcataggttgacatcccactttctctttaccagtgtgaatgtcaagttctcttactatctccgtcactctcctctcacaccatccaggaggccccactagggagtggcaggcagagaggaggaagtgtggggtgtgggtagactcctcctcatggttcaaccttgagtgcaggtattaccagttggaagaagagaggtcaggaaccagtagggattggatggagatgagtgaacaccccaccactctcaggcccatgcaggctgtgaaataaaaccgtgatgaatagactctgcatggcccctgctggtctttacccttcagcattctagatagtgcacctcatatgccatgatgcaaacaccattgactccctccagggcagatataaatctccctttcccccgcatccagcaagcacactccatcagcctatgggtcacttcaaccccatgactccccagtcgggactgtggcaaatgcaatagacttcagtccagtctctgtgcctggagaagaaagggaagctggtcagagcccacaggaggaggtgacccacagggagccagtagtaggtgggtgtgagggtgagtatgacagagcagttacttgggctcagcagtcagactgtctccttagagtcatgagtcagcccattgacagttactaaacttcctagtgacctcagtttccttgtctgtaaaatggggctgatagctgtctctaggtcatagggctcttgtgaggtttaaatgatttaattcatgtaaatcccttaggaacgtgactgacactttttttaaggtacaattctgtaaaagagtgggacccatccatttaggtcctgtttccttattccaggtgtgatgaaaccagctctccccaacacttatcctgacccccgttctatgcctgcaggtggagcgctgttctgtcccctacaacctatggtgtggggggcaaccaggaaaaggccagggtggtgccaagtatgaggaagtcacagagtaacacacacacatacacacatacatacccatacctgcttatatacataaatatgtacagatacatacatatacgcacttataaacacgcacatacacatagatgcccatacctgtttatacatccacatgtgcacagacagacacacacacattacacagtcccaattccttgattcagtttggggcctgggtaattccagttcaatctcttttaagaaatttaagaatctgaaagagaaagacctgagaatttttgtcccacaagagacagacccacttcctaggcactgtgggactttctgagccccatgtggccctgctcctggaagctcatggaggagcgggaaaatctgacttaacatcaaggttctgaagtccagaggcagccctaggaactggccttccctgggtaccaggcctccgggagtccagcaggtccccttcctcctatctcacctatgacgtctcagcctgccttccacagccaagggcccctcccaggctttgctgcacagcaggaatctccacggggctctagaaggaacagggacagagtttaacttaaccccctcgggtgatgcaccctcaggtccagttttttggttctaacattggtgataccacttttcagtcttaaaatgtctttttcggccaggcgcggtggctcacgcctgtaatcccagcactctgggaggccgaggcgggcggatcatgaggtcaggagatcgagaccatcctggctaacacagtgaaaccccgtctctactaaaaatacaaaaaattagccgggcgtagtggcgggcgcctgtagtcccagctactcgggaggctgaggcaggagaatggcgtgaacctgggaggcggagcttgcagtgagctgagatcgcgccactgcactccagcctgggtgacagagagagactccgtctcaaaaaaaaaaaaaaaaaaaaaaaaaaaaaaaaaaaaaagtctgtttcttttctgatttgcaaaaaggtttataacttttgatactcacatctgctactttctattagaacctagcagtccttcgtggtactttcatctactgtgtctctgccgattccgtttcctggtgttttatcttctggttgggttaaagattatatgtaattgttgggcacagagggccaggaaagaaaaagattcccggtgaagctagacccaagtacctcactgttgacaagggtaactactgtcctttcctatttacctccctgcactccttcttctctgtcctccctccccacccacccatgggagagcctcaggagcctgggccagaatccccaaccccgcagtagggaggaggaggaggaggcggcgacggaggaggagaaggaggaggaggaggagacggagactgttcggtctcctctttcctcaaatatggatgcctccaaggaacataattccagctccaagaggtcctgacgtggggcctggaggaccccagtacctgccggcagcatcatctccttgccatgctccaggtgtctgagcagccacctagtgcagtgacccatcggggcttcccttgtggcctccgcggtccagaacctctcccaggtgtgatggatcctccaagccgctctttgagccgctgtccaggtctgcaggtcctcgttcagggacatgaaatctccttgtcgtaggcggacttaaagtgtccttcgaggaagctcctgtccggagccaccacccagccagacagcagcatctgcaggtgcggtgccctggacctgccccagggtgagccggaggcggggccagggaggggagggaggtcgccccgcccaccccagctccttcctccctctgtcattggtcacagaacaagtcagtcatgatccagattgaaggagaaacctggagcaaaatggccccagcgcttccccacctgagagggatcagctgaggccccgcccccccatccctgggagaaccgggctggtcactctggggtcggggcggggcacacctgtgcccggagtctgaggtcactcaccggctgaccctggtggtggtgcgggcccaggaacctcaggcccctcagtaacacattccctgcggtcttcgagaactttcctcagggcgcccacagccctgtgccatcttctccacccgcgcttcacgctctgattctcgccgcggctgtggaagctcaggaatcgcgtgtcgcccacgaaggcgccgcggaggaactcagggcccacgtggtgaaggcggagcccggcggccttcaagtacccggggtgcgggcctgggctccgggaacccgcacattgcgggcgggagaggcgcagggtgcctgggacgccgccccgctcgcctctctcctggacgccgtcgccctgcctccccgcggggacacagcctccctcccacgtcccgcccggcaccggagccgctcacttgggagcttcttactgtgtggggggagctggggaggggacagagggacgggaaccaggggagggtggcttggggcggcggctctgggagaagtgacctgaggagtctgcagatcccagcccgggacggaggcgccgcgagaggagctactaagccctccaagccgccctttccctcttgcctccccagcccagttcatcctgatcttctcaccagcccagttctccctaaggtcagggcccacaaaggaacaggaagggggttccgggacacaggatccggcttctctgggtatcttggagtccaggaaggatcctggagatctcccactttatgaagctcatcctccactgactctgatggcttctctagaacccgagaccaactgataaaggcgtcccatctggacgcccttatcagtcctgggggaaaaacaagagccaagggtgagaggtggccatgaggtcagggaaacccctgcagaattctcaggagagggaaatcttcagagctgtggctttggcttagtttgtcttcccaccagccacctgtcctggagctggagatgcttaagtttaaaccagagactttggatattttccctgagtgacataatccttgtctttctctcctggaatcgtgggtccagaccatcacagtgatccagtcggccccctctccttcttctctcactccaatctctctccctgagctggactctccgcccaccctcacattctggaaaagtgcagtggtgtgagcatggccctggggcagaattgtctgggtgcaaacccggctccatccctacttttgtgtgatcttcattcctatggcattaactatgaaagggaaaaataacaggcacaagccatggatgtgtagtcagaataaaatgaattggcatttttaaagtgcgaagaccactatttgacacatagcacaataaaagtgtaaaatgttatcattcttgtcatttctttaggccctttttcttgaggtcttcctcttctctttgggttcccatgaaaatttaccctgttggaagttgatgtcagcaagagacctcctcttgggaaatgctggctcagtgtggggcctcccttttagtaaagggaaaaaccgatggtggaccagtagctagtgagtcagagtccattttatttaaacaagatcacctacctagaattaactccattttgataaggacatgcatctcacagataagcccagtgtaatttatgaggagattgctttatttgtgtagaacttactctagtgcttttcatagtcttgcaacacattttgaatccctggttctcatttcacactgactgcctcacagagtgaagacgatgagaagtatcttcatactatattcccacgttcgtctatcggagtcacagtcatatattacatatgcagatatttttcctagaagtttgaatttattgatgtagattttaatctggaatagatagatattacctaacatttttgtttttattacctctaagttacacatgcttaagtagtcactactgatacctatgcattttctcccttggcatgtgacattgacataaaaattgtacattgtactttagttttcagcaattattaattatgtaatttggatcatccctcccattgagtactactggacaagtgggaaaagggtacatatttgaaaaatctgatggaaagtatgaaggggctaaccaagcagtaaagatttgccaggccaggaaccaggagaaggcagaaatctagaagagcaagttgagctgcagggttgcttttgtcctgggtgatgttggctgctctgggcagtgtctgagacctttgagggctaggtggataaagtctacatctaaaggctgcgggtgcatatgtggcactgtaaatccctgggattaggatgggtcccaaagggctgatccataagagcaacacagtcagttctcaggagtggcagctcaatttttgtttgagtggtccagcagttttcactgctcttattaaaaattgtaattgaggatcttcccagtgtcataaagaagaaaagaaatatacttaaaaaggtttgaaaagaaggcacaaaactcttataatttgcaaatggtaatatgctgaatgcagaaaatacaaatgattagaacactcttgaagttaataagatacatatatatataaatatatatatatatatatatatatatatttttttttttttttttttttttttgagacggagtctcgctctgtcgcccaggctggagtgcagtggcgagatctcggctcactgcaagctccgcctcccagatttacttaggccattctcctgcctcagcctcccgagtagctgggattacaggcgcccgccaccatgcccggctaattttttgtatttttagtagagatggggtttcaccatgttagccaggatggtcttgatctcctgacctcgtgatccggaagttaataagatatttttgcttggtaggtagaagaaattatagagctgttttgcacagatataaaatgaaaattttaaaaaattgattcagcaaaagtgcgtacatataaacttctaaaactaaacctaacaaattctgtacaagatatcaattgggatatttaaaaaaccctactgagtaataatagaagacagtaattaaagaagacagtgaattaactgaatcaatttaccaggatcctggcttggatggttcaatataataatgacattaatttcctacagtactctaagaactcaaacacatctcaatcaaatgtttatcaagcatttttgcaacacatagtaagccaattttaagccttatattgaaatatgaaagagaaaaagtagctatgacactctaaataagaataataagcagagagaatttccttagcagatattaagacttatgttagagttattttaattaagagagtcgagatgttgagacagggtagtaaactagaacttgggaacagaatagaaagccctgaacgtatgtagagcagaggcaacattacagatcagtgggtaaaggaaaacgatttagaaaataatttaacaacaattggttatctatctggaaaaatgcaattgtactcatctcttgtaaaaaaatgtgattgtactcatctctttacagtaatatagtagaatatcttcattactttagtgtagggaaagatttttatgcaggttacaacaaagtattaaccccagggtaatctttgacaggattaaagacattaaagttgagctcccagattatttggggttttccattccccagtggacagcgataaatgactaaatgttcctctgggaaagtcctgtaaaaagaatttatctcagagtgaattatagggtcctttctcaagggcaccagccttctgcttatttgaggggctctgacatatcagctggctttggtgtagctactggataagaatttctgaatatccaggactcaagattggtgactgctcagcagacctagcagtttttatacctgtatgtgtcatgtggcaccttaatgccttggtaaggggggcatcctctcagccctcccgggagatgtggttaggagatgttaagtaggttgcacataatggatacattcccacttttccgtctttctgagctgtgttcagacactttcctctgcagtatgcctgtgatagggattctgttgatataggctagtggttttcacaaactgttgcatatagcaaaatctggagagatgatttgttttaataaactcaaggctctagcctgttaaattagaataatatctgggcctgtgtagttttgctacaattcccagatgattttgatacataccaaatattgagaaccactgctttgagctactagtttttaacttggctgttgattggagtcaaacctggagagttttaggaacaatactgtttccaggatcctacttttgatgaattagatttcattggttttacatgttgatctagacctggggctatttaaaatctcccacgtgatggaaagctcagtcaaatttgagaaacactgtgctaggccacagttgaattcgggttttaattagctaacctggctgactattaacatcactcttaggtgttcaaaataacacatttaatctaagatactgggtgaagatcccatattgatgaatccaggccaatcacatctcatttctccctatgtcaatactgaaagctatggggagaaatccctccaaccagtgctcctcatcactctctccgtgatgatgctcccatttagccgatcccaaataaaagccagaaagcaaggctgccttttgtggtccagcaggccatgcagcacagtgtccaggacacggagcagggagagtacatggagtgtggatcaggagtgcacagagaagataccagcagacctgccctctccattgcactcaaaatcacactggatttcctagctagtgcaatcaggcaacagaatatatcaactacatgaattaataaaagctttaagcaaagtcattgaattaaaactatataaaattatttatatttatacataccacaaccaacactgaaattcaacaaagaaagagatactgtgaacactagcaccatatttcaagatctttggaataaatctactaaaagatgcacaagtaaaaccagcaatactttatttaagagtatttaataagtaaacattacatgttcatgaattataagtctcaatgtggcaaaatttgtcagtgctctccaaatctgattactgaatgaaatctctattaaaaataaaattgttaaaggtacttggaaaggtgcctgtcaagctaggaaagttgccaatgatagaaaaaacactcctgaagtgaaaactcaaaatttatggatttacttcattgtatagagagacatattataaagccgtggattatcttgggatgatgaaaatgttctaaaattaaatatgcagatttaaaactctgaatatgtgaaaaaccattgaattgcatactttagatgggtgagtagtatgtgatttatatctcaataaagtttaatgaggaaaacataatgagatattttgaaaaatgcactagaatttctatattaaaattattgagttttccaaacactgatgagaatacagaccatcaagatctaccacacattgcttgccacagccactttatctagcagtgtggcatcatctctttgagtgggatatcatacacatataccagtaactccactcctaggtgtataattttgacagatatgtgcccattgtgccaacagactagtgctagaagacttgtaacagcattgcttgtaattttaaaaaatctgacaacaaatgaaatgaccataaacgagagaagggttaatttaatatatgatgtatttattcaatgaaatgttacaaataataaacatgaatactctacagacacctataaaaacttagcaaacatacatttgatctaaaatgaggtcttgtaagaatatacacagcatgattccatttgtatgaaaaattcaaaatttatataaagtttgagataacctgtgttgttttagaaatatatgcatggggtaaagctttaaagaaagacatgaacaggattactatgaaatcagaatgagggtgaactctaacgacagaaaagggattgttattgctatgggaattggtatgaaaacttctgggttttttttctgagttttgtttctttttcacacggatcttccctttaaaaccatgtgttaaaatgtaaatgtaattcaagcccttcacttttggttgtaacttaacagtgtaaaactggttttaaaaaaagtaatgttaattatttatctgtagttggaaaaattaacctttactcacaaaagagatggatttccccctacaccactcatcagagaagagaccatgaattggaatgggaactcggaattgtcatcatcctataattctactcaggattctgtccttaaaacattggcacactgctgtccagctcccttctgtagtgatggaatgcctatatctgtgctgttcattacgtcagtcaccggccacccatgaattctgagtatttgaaatgtggctagtacaaatgagaaactgggaaaactgacttttaaaattaatataattttaattgatttaagtgtaaatagtgtcttgtggacaaggcaacattacaaaaataaaatgcagcacccgctgtctctgtctttttgttcagccatgcatcgtgtgaatgacagcttcattgttactaactttgaaaagaccccatttcgaagaaaaatggaatttcagcttcttcaggggtgagactttcttgaactcagcatctaataaaatacccaaaccacacgaaaggaccctgtttatctctgttctctctgggtatagaaaaacatgctgaattcttatttgtatgcgaaataaaggggttttcaatgggaaatttttctgtaaggtgagaaatttattctaaatatagttctctaatttcaaatgttttatccaagttgcttataattattactgtttggctactatagtgtaaatatttttcaaatcatctgaaatttaaaaatatagcaatataattctatgctgtgtgtgaaaaggattaaaaacaaggtaagcctgtgttagcttggtaaattatcacaatataagagtgttgtacaatgtaccaagtttaatgtaaaagataatgaacacctcacacagcccattaaattaatcagaaacatttcactgtgaatgtggaagggaagatgaacagaattttaaacacattgggtgtgcacagaggatcagaatcgtgaatttagcatcacttttatatattttttatttacttagagagactttagcacttactatgtctcaggcacttttctagatgcttttgatgcattaaaacacatttaatccttgtatcaactttaagaagtagccaccatgctaatcccaatttacgggtgagtagtaactttgcgtaactccagccaagggcatgataagcttttacagttcttttgtagtttttattcctaaaacatggctttcattcatcttttttctaattaatgttcaaatatatctagcaactggttatgttttgtaggataatttttttgtcattcattctacaatgatttagcttagcattaaattttatggaatttccttttagtttgtaaattagaaacaaggtaggcatttacttcttgttgatattccccaaacttcattgtacacaacagcttctctcaaataggatctcacagaatcagtccaaggttgaactcctaacactaaaattttacattaaaattgcattatctgttgcccaggctggagtgcagtggcaccatcatagcttgctgcagccttgaactcctgggctgaaggaacctcctgcctcaggctcttgagtagctgggactacaaggcatgcatcaccatgcctggcttggtattttcttttatcagatagcagagtgaagcacttgcattacaaaaataaaatacataaaaattacgacgactttgccaatctaacatatgacttcaaatggtagtggttaaattaggagccagtcagccactttcaaacatgtttttcaaaatgaaattttaaagacagtgtcattgtttacttctactactactcataggtttagctgtggtcctgctatagagtttgttaagaaaacttccctgagttgttttaaatggtcttttgaaagccaaacactgcaatcctataatcattggaattgggaacaaacgatacgtttctaggctttattttattataacttaaaatcttagtgatggtaggattatttttccttattgattttttctaatatatttaaagcattgataattgtgttcagtcagttgtattttatgctgaatcatttgaccatgtgaggaaagcagatttttggacttttagcccatcttgaccagagggatcagtaaaaacgtggaatgaagaatttcttcctgtgcacaccttttttcttgtgtgcattgcccctcattcacacttctgggcattcatacatttgtgattgcacttttttgtattaatttggaatcatttattaattccacagtcaagttaataaaatggttaaaaataaattttacatgaattttctcaaaattcattacttgatccatttattcattctaaacccatgtcaaataccattctttaaacctcatcttgtattaaagttgctttcatttattaattcaatcaaatggcattgaaatttgtagcaagaggcatctaagaaggcagaatgtttctatctgttctgggattttaacaggggtagaaagatgtgaaaggcagagggaaaagaggcctcacagaggcagcccagatataatgacacctgcctccctggccagaagccaacttccaggattcaggattcaggaataaagtgtcccaatattcagaaggtttcctggtctctcttgaattcagtgctcagttggccagggctaagaccctcacacattttggtttgaggatccaagcatagaatgtggctgtctctgggacatttcatactaaagaagcccagcacgtatagacaaagggtctagaggccaccagccacccttccatgcagctctgttcaaggcacctccccgtgctccattacttatgttggccacgtcctcaggagtttagagaaatggccgtgttgtctctgagtggaagtgaggggaggacactaggatagtcaggattttgaatccctgtgtcctttccctccatctctaccagagaccacttgtggaaaaaaaagacacgaatgtcagaggtgaatccaggcccatggatccattgtggtcaggggactgaagccaagtggcccaacagtgatgaagtctatgaggccttcgtcaccccaaagctccctcgattaggagctgcctcttactgccatcagggaccccaggagctggacatggcattctttgtcatttctcatgaggagctggagaggtcccagagcatatagaccttaatcaaattggagccagagtggagtcaggtaaaactctccattgggcaatataatatgtttgttttaatttgctagagctgccataacaaagtaccacacactgggtgacttaaacaacagaaattcattgtctcacagttctggaggctggaagttcaagatcatggtgttggcagtgctgatttcttctaaggttctttccttggcttgtagatgtgttctctctctgtcttcacatggtcattcctccgtatctgtctgtgtctaatcttctctttttatgaagacactagtcacattgaattagggcacactcacatgacctcattttaccttaatgacctccttaaaacctctccaaatgcagtcactctctcaggtactgggggttaggacatcaacatgccaattttggggggatacaatttagcccataacagtctgattatccttgagattgcattttctaaagaataaaatagagtaaatttctttggctctgatactctgaaattttgttcttgcaatgagaacaaaaaaatggagaaccaaaggttggtgtcacccagagggtgagccctccctaactctggctgccccaagacctggtgctgtgtcataccagaaacccttgttccattctagtgattccagtaccagattttcagctggaaagaggatgctctcccaggggaacaacttctcctgctgtgcaggcttattttctttatatttggagggaaaaaaaagttgatgtaataaaaagaacatatttgtcaaatttttttggtaatcattttgatatccttatcaataccccatgttgtgatgaatatgttggctttattttggtggaagggacatgacgctggtcattttgagccagaattttctgggcctttccataggattcagtttctgccatggtggataaggggagagctcttggtgtagggtttggtctttataatgaaccatgctgtttgggcaggaggtttatctctggaaagttgaaggttaggcaggagtgcgaccctcctcctcattcaaaaggtcagggtagagcaggttcttgttcagggcgcagtgagtgagagaagggaaagtgacagagagcattctttcacctttttgtgacatgcatgcatccaagtctctggtgttttaaataactgaaactgagatctagttccacttatctataaagtagaactgtggagaagggagcatatcgtccccgccactggagagatccctgaagagagatttgtgagcccccatttcatcaaaaatgacacaaaatttcatcaaaataaagtgaaattgtgggtgtagatggggctttatttagagcttcgactccccacctgcttcctaagacatgatccttccccaggatactatagaatcacagggcttaaactggaggggtaaggcgtaatggtgttcttcctttctggcagataggatgttttgaattgcatgtattttccaaagagggctgcaaaaatatctaaatatcttccatcgcacttgcttttctttagtttgacccaccactccctcatcaagaggtaagttctctccactccttaaacataagcagatctgatatctgcgttacccaataaaatatggcagaagtgtggctgtgtcagtctgggcactgctgttaaccatcctgcctgcgtctggttccttccacttcaatccctggaccatgtaacactcccaggccatcatctgagcccagccaacacatagaaccctataagagatcattaaaaattcttagttactatttttgtgaatatccttctctgtctttccaatttcaacttctgtgtgtcgttagatccaaagtgagaatcttttttttttttttttgagacggagtctcactctgttgcccaggctggagtgcagtggtacgatcttagctcactgaaacctctgcctccccggttccagcaattctcctgccttagcctcccttgtaactgagattacaggcacctgccactacacccggctaatttttttctatttttagtagagacggggtttcatcatgttggccaggctggtctcgaactcctgaccttgtgatctgccagccaccgtctcccaaagtgctgagattaaaagtgtgagccaccgtgcccagccagatcctttttattctgtccattgtgataatctctgaattctgattgggaagtttaatccatttacatttacatttaaagtaattactgataaggaaggatttacttctgtaattgtgatgttggttttatgcatgtcttatagctgttttgtccttcatctccttcattccaaccttcttttgtttttagtcatttttcatttagtcgatttttttctagtgatatgttttaactgccttctcattttcttttgtgtatattttatgtatatttctttgtgattactgtggtattatatataacaatacagttataacaatcttgaactgaaatcaatatgaaactctgcttctttacatcttttcccacccctcattttacgttattgatgtcacaagttacacctcggcaggctggaaggctggaaagtcataatgttgcagccttcaatctaaaatttgtagaccaggctggcagattggaaacctaaagtgtagttgctactgtcatcttgaggcagaattttttcttctctgggaagactcacatttcgcccaaaggccttcaagtgattcaaaaagtcccacccacatgttttagggtaatttccttttcatgaaatcaactgatatcagattttaatcacaactgcaaaacaccatcatatcaacatataaatttagtgtttgattaaataactaggtgctatggtttagtaaaattgacacataagacccaccatcccagtccatgcttgtgaacttggcacccattaacattttccttaaaccttacttcgtctccaaataaaaacaattataaagtcttacttttgccaaagatgatacaattaacttgcatccaactagaaacacactaaccctttccacagaaaaagatgcatgatatgcactcttctctttgatatactgtaacctaaataccatgcgtaataaaagttaacttttattaataaaagggaattattgttagcacatcttatgttttattacagatcatcaggaaaagatgaaaagaaaggtatttgctcaatacatgtaaggatacatacacacagacacaaatatcattataaaaacataaagaagtaatgctgataacatttactgtcttttatttctgtaagtgctcacatggttacagctggttatttatttatttatttacttacttatttatttgagacagggtcttgttctgttgcccaggctggagtgcagtggcattaccttggctcactacaacctccacctcctgggcacaagtgatcctcctacctcaacctcctaagtagctgggactacaagcacaccaccaagtctgactaattttttgtaatttattttcagtagagatggagtttcagcattttgctcaggttggtctcacattcctagacttaagcaatccacctgcctccgcctcccaaagtgctgggattacaggcacaagccactgtgccggccacaactagtatttataaatactttttttgttgtttttcactaaccatcccatattcccatttctttcagcaagtccgtcagctgatcaggtttcttttcctgcttgggtgactcaaaccttcattcctgaagggtatgtgtcattactagtcctacctgacttgggttgttgccgtttttattgactttaattatacggcagagtattactaagagatgctctaaaagatctcctgtgttccagacacagtcctatttactgccattgtgtagtagtagaccaattccccctgatggccaggaccaatcaccccagacagtgcagtaactccttcctttgttgattcagaatcatgaggctctgaagggcctgggtagctgtcttagcttccagctcaatggttcatttctgtgtctcctgtgggagcattcctcctttagtaaacctctagatcctgatcctgttcctcctgactgggcaagacctcccaaccagggtctccagcacctcctacaggtgtgttcaggctggcaacaagtctgtactttcctggaacagacctcccagaggaaggggcagactgccatctttgctgttacatagccttcactggtgataccttcaggtactggaaaatctgaggcaactagggactgtagcaggcccctagcaaactgtacagccctatagaaaagtggccagactgttaaaagagaaaacaaaagaagagaaaaaaaatccactcaaaggtcagcaacctcaaagattgagggtagataagcccatagagatgagaaggaatcagcaaaagaatctgataaccaacctgatagaggtaaaaaacactttataagaatttcgtggtgcactcacaagtattaatagcagaatagagcaagtggagaaaagaatctcagtgcttgaagactggctttctgaaataagacaagaagacaagactagagaaaaaagaatgaaaaggaatgaacaaaacatctgaaaaacatgggattatgtaaagaaacaatgtatgaatgattggtgtacctgaaagagatggggagaatggaaccaatttggaaaacatttcaggatatgatccatgagaacttccccaacctagctagacaggccaacattcaaattcagaaatgcagaggaccccagtaagctgctccatgagaagatcatccccaagacaaataatcatcagatgctccaaggttaaaatgaaagaaaaaatgtcaagggtatccagagagaaaggccagatcacctacaaagggaagcccatcagactaacagtggatgtctcagtggaaatcctacaagccagaagagactgaggtccagtattcaacattctcaaagaaaagagtttccaacccagaatttcatatccaaacaaactaagcttcataagcaaaggagaaatcagattcttttcaggcaaacaaatgccaagggaattcattactaccagacctgcattacaagaactcctgaaggaagcactaaacatggaaagacagttaccagccactacaaaaacacaatgaagtacacagactagtgacacaataaagcaaccacataagaaagtctgcaaagtaagtagctaacatcatgatgataggatcaaatccatacatatcaatactaaccttaaatgtaaatgggctaaatgccccatttaaaagacatagagtggcaagctggataaagaaccaagacctatcagtatgctgtcttcaatacacccatttcacatgcaatgacacacataggctcaaaacaaaaagatggaagaaaatttaccaagcaaatggaaagcagaaaaaaagccagggttgcaactcttgtttctgacaaaacaggtgttaaaccaaaaaagataaaaaaaaagacaaagaagggcattacataatggtaaagggttcaattcaacaaggagatctaactatctgaaatatatatgcatcctatacaggaacacccacattcataaagtaggttcctagagaccttcaaagagacttagaatcctcacacaataatagtaagagattttaatactccactgacaatattagacagattatcaagacagaaaattaacgaagatattcaggacctgaactcagccctgcatcaaatggacctgataaatatctacagaagtcttcaccccaaagcaatggaatatacattttttgcattgtcacatggcacttactctaaaatcaatcacacaattggaagtaaaacactcctcagcaaatgcaaaagaactgaaatcataacaaatagtcacttggaccacagtgcaatcaaattcaaaataaagactaagaaattcactcaaaccatacaattacatagaaattgaataacctgttcttgaacgacttttgggtaaataatgaaattaaggcacaaatcaagaagttctttgaagataattagaacaaagatacaatgtaccagaatctctgggaaagagctaaggcagtgttaagagagaaatttatagcattaaatgcccacatcaaaaagttagaaagatttcaagttaacaacctaaaatcacaaccaaaagaacttgagaacaaagagcaaacatatccctaagctagcagaagacaagacgtaataataaaaaattaacaaaggtattgtctcctgaaggagacagagacatgaaaaaccactcaaaagatcaacgaattcaggaggttttttttttttttttttgagatagagtttcactcttgttacccaggcaggagtgcagtggtgtgatctcggctcattgcaacctccgcctcccaggttcaagcgattctcctacctcagcctcccgagtagctgggactataggtacccgccaccatgctgggctaagtttttgtacttttagtaaagatggggtttcaccccgttagccaggatggtctccatctcctgacctcatgatccactgcctcagcctcccaaagtgctgggattacaggcgtgagccaccgtgcccggccactaccactgacattcttcacagaactagaaaaaactattttaaaattcacctggaaccaaaaaagagcctgaatagccaaggcaatcctaaacaaaaggaacaaagctggaggcattacactacctgatttttttttttttttttgagatggagtctcaccctgtcatccaggctggggtgcaattgtgtaatcctggctcactgcaacctctgcctcctgggttcaagtgattctccttttctcagcctcctgagtagctgggattacaggcacatgccaccacgctcagctaattttttgtatctttagtagagacaaggtttcaccttgttgaccagactggtctcgaactcctgacctcatgatccacctgcctctgcctcccaaagtgctgggattacaggcatgagccaccacgtccagtgtatgctacctgatttcaactatacttcaaggctacagtaaccgaaacagcatggtactggtacaaaaatagacatatagaccaatggaacagaatagagaacccagaaataagaccacacacaactatgatcattgacaaacctgacaaaaacaagcaatggggaaaggattccctattcataaattgtgctgggataactggctagccatatgcagaagattaaaatggaacccctttcttacaccatataccaaaatcacctcaaaatggattaaagacttaaatgtaagatccaaaactgtaaaaaccgtaacagaacctaggcaataccatttaggacataggtatgggcaacgatttcatgacaaagatgccaaaagcaagtgcaacacaagcaaaaattgtcaaatgggatctaattcgactaaagagctctgcacagcaaaagaaactatcgacagagtaaacaacctacagaatgggggaaaattttttgcaaactatgcatctgacaaaagtctaatatctataaggaatttaaacaaatttacaagaaaaaacaaaacaaccccattaaaaagtgggcaaagcatataaacagacacttctcaaaagaaggcatacatgcagccaacaaacatgaaaaaatgctcaacatcactgatgattagagaaatgcaaatctaaaccacagtgagatgccatttcacaccagtcagaatggctattattaaaaagtcaaaaaataacagatgctggcaaagttgtggagaaaaaggaatacttatatactcttggtggaagtgcaaattaggtcagccattgtggaagacagtgtggtgatttcttgaagacctaaagagagaaataccattctacccaaaggaatataaattattctattataaagacataggcacacatatgttcattgcagcactattcacaatagcaaagacatggaatcaacttaaatgcccaccaattatagactggataaagaaaacgtgatacatgtataccatggaacactatgcagccagaaaaaggaatgtgatcatgtcctttgcagggacatgggtggagctggaagccattatccttagcaaactaatgcagaaacagaaaaccaaatactgcatgttctcacttatatgtgggagctaaatgatgagaatgcatagagacatagaggggaatagcacacactgggcactggggactttcagaaggtggagggtgggaggaagaagaggatcagggaaaataactaatgggtaataggcttaaaacctgggtgattaaataatctgtgtaccaaactcccacaacacaagtttacctgtaaaacagcctgcacttgtacccctgaactgaaaataaaagttaaaaaaaggaactgatctgtggattttggctgttgctgagtaggtctatttcaattatgcaaacaagcactgaggaaataatcacagagaggtcaggggcccactgggaccactgtgagaatggttcatgtatgttagggcttcaggttttctattcttcctaatgtaatcttggcaggttgtttgtttccaggaatttatccatttcctccaggttttccagtttgtcagtacacaattgttcataatagtctctgatggtcttttgtacttttgcaatatcagttgtaatgtttctcttttcttttctgattttgtttgagtctgttagaaataaagctcgaagtcacaaagaaaatgagcacttgaacaaaggatttctcagcaaggcaatttttacttctgcagaagggtgctacctgtaagcctgattgccacgagagcacccagaacaagggaaagcaggggtttttattcctaacccaagttgtttctactattgtgtcctgtgtccattggctggagctggaccgcacagtctaaactgatcccggttggctaaaaactttaactttcctaaataaggtaaaggtgcaatggggaacaaaggaaaggagggggtcacttatgggaaaccaggaagacaataagatttccaaataaggcaagagcataggctgcaagctgggacatgtctgggcatgtctggtcagatccaggcagactaggagttaggccttggttcaagtacaagaacatagaatgtgtttatttctttactgtatgtaacaactacttggagcacaataaagaatcattagtaaattagaagatttgttagtatgaagagtaagggaaacttaaagaaagattttaagaggaactatcttctttttttgtttgttttttgtttgtttgttttgagacagagtctcactctgtagcccagactggagtgcagtggcgcaatttaggctcactgcaacctccgcctccggggctcaagcgattctcctgcctcagtctcccgagtagctgggattacaggcacgtgccaccacgcccagctaatttttttttcctgttttcttttttttttttttagtagaggcggggtttcaccatgttagtcaggatggtctcgatctcctgaactcatgatccacctgcctcagcctcccaaagtgttgggattacaggtgtgagctgtgcgcccggctgaggaactatcttcttaacacttatcattcttaaccaaaaaggaaaactttggagaggtacttttattctttacagtttccccctcttgattttacagttcttcctcttcaaatctccttaacatatcttgattttgttgctcttcttaatcagttagaaagaacaacttatctgagtaagggtgaggagaattgaaaggggttttggtaagagccttttctataagcctttgcactaatccatgaatgcaagatataatacaacattctacaaggataagtacactgattatgagagccagtgaggtgagaattgaggacatgagtcctttccacttagcaaaccacctttccattaagctagtgaaaggatcatttattccagagtttttagctagttcatttgatgaagcagtaagaccttgtagtgcttttattatagttcgatcaggggcagtattattaaggataaaagtacaacattgagttccaatcataacacaaaccttgcctttttctgctagtatcatgtctagtgctgttctattttcccaagtcatctgattggtgggtcctagttgctcagctattccctcatagcatcccttgtgcaattaatggggtcagcccccgcccggccagccactccgtcagggagggaggtggggggtcagcccccgcccggccagccagcccatccgggagggaggtgggggggcagcccccgcccggccagccgccccgtccgggagggaggttgggggcgcctccgcccggccactgccccgtctgggaggtggggggcgcctctgcccggccgaccctgtctgggaagtgaggagccctctgcccaggccgccaccccgtctgggaggtgtacccaatagctcattgagaacgggccatgaggacgatggcagttttgtcgaatagaagggggggaaatgtggggaaaagaaagagagatcagatcgttactgtgtctgtgtagaaagaagtagacatgggagactccattttgttctgtactaagaaaaattcttctgtcttgggatgctgtcaatctataaccttacccccaaccccgtgctctctgaaacatgtgctgtgtccactcagggttaaatggattaagggcggtgcaagatgtgctttgttaaacagatgcttgaaggcagcatgctcattaagagtcatcaccactccctaatctcaagtacccagggacacaaacactgcggaaggccgcagggtcctctgtctaggaaaaccagagacccttgttcacatgtttatctgctgaccttccctccactattgtcctatgaccctgccaaatccccctctccaagaaacacccaagaatgatcaataaatactaaaaaaaaaaaattaattaaaaaaaaatgaatcattgctgattgtagtaaatataatttacccaacctacattttttttttcgagatggagtctcagtctgtcgcccaggctggagtgcagtggtgtgatctcggctcactgcaacctccaactcccaggttgaagtgactctcctgagtagctgggattacaggtgcgtgccaccacactcagctaatttttgtatttttagtagaaacagggtttcactatgttggtcaggctggtctcaaactcctgacctcgtgatctgcccgccttggcctcccaaagtgctgcgattacagacgtgagccactgcgcctggctatccaatctatatttttattgatagtcacccacctgaataatgacttaaattctgcagctatttggtttcaagctttaaattcatctggtactccaatagcatctatataaacgttgggatcaaaagactcacaggaacagttcttgtactacgatgcctagttgttaatatttttgtgaatgaaatgtcagggtgaaagagatagccaattgaattagagtgcaagtaccactccagttatttggcagagtctcccacaaaggtccaccacaataccaccatacatctgctcggggatggataagggaggactgatgggttagctcttggaagtgcttgacctcactgcatcctgtcaggtttccaaggaaagccaagttttctccctgttgtgagagacacgaagcaaatttggtcccagaagatggaggctgaatggcctttgggggctgatccgcagagtgctgaacctcagggaacagcaaagaaagtctttgacacgatttattaccccaggctgtgaggtcttggagcagagctaccatgcagtccatatctggtctattacaagaccatctgagtggaaaggggacagtttgggcctctggtctgccctgtgcccaagcataacaatcgctcttattttgagtgtggatggatatttaatccattccagccaggcatttgcatcctgagaccctgtttcagtggctagagtttacctcaggtcttttacttctactatagctactttggttttgtcactgggtataggtggggtgatggtttgaggaagatgtgttagagaggtggaaggggcaataaagcagatttcaaaaattcccctaggatcctttcccaagatgttggcccctatgctataaatacgacttaatgaagggaaagagttttgggatgttgcaatagtaatagtaagccgaataggattacactggttatatggacaatttagaagaggcaatcccttttgtaaaatggatatatggctttaaggactggcaaagactggtgggagcagtccagcctggacctttggtgttccataggacattagaccaagtatagcatagggactctgttttaaggggacaagagtcccattcccaccagttcatacagctactatttttggggttatcatgatctttacaagaatttgttatatctttccaatctgaggaagttcaagagggacaaagatatttatctgaggcagtaagctgtctttggtcctgtaaatttccacaaggcatgactagagaagcatcaaaggtaataattttgggcaaacttgatctagttacattaatgatgagatgggggcagttaagggaaagaaaagaagaaaaagagatagattaagtttttctttttatcgttactctggtgggagttgacggaataatggtccatgtctctggagaaggtgacgcctacttgactcgagtataatgggtccaccctttctcagtggtccgaactactgtttcagttgttgtgagcaccagatagggtccttcccaggtaggctcaagctttccctcttttcagcctttgataaggacgtgtgatctccgggttgatgttggtgggcccagaattcaaggggtggagtctgtgctaccagaccttgagtcctgagggacgaaagagtggaagacagaccaaatacataatttctaaggaactgatcttttgtttcgatcataggaaggtcagtagtagtgtttagataaggtaacccataaagcatttcataaggagacaagccaagatccctccgaggagaagtttgtggattcttagtaaagcaatgggaagagattttgtccatggtaggcgagtttctaaaattaatttggttagatgactctttaaagtttgattcattctttctactctcccagatgaaggtggaggccaggaagtatgatattcccattttatccctaatacttggattagtcttttaataatgtacacggtaaattgggtcccattatctgaatcaatgttctctattattccaaacctgggtatgatatgttctaacagagctttgaccacattactggctgttgaacttggaaaggggatggcttctacccagtgggtaagatgatctactattaccggtaaatacttaaggcggcctactgggggcatttcagtagagtcaacttggacactttgaaaccgccttaacccaggatttctccctccgggaggttgtcttttgagggtctgcttattagattttctgcacagtatataactttccaccatttgcttggcgagggtgtatattcttatgcacccataaaccctaaggactgcatcacacatggtttgaggaccccagtgacatccttgatgaagctgtgacaatatttccctcataaggtttgggtaacatttcccttccatctggtaatacccactttccttttgagttttcttcagctcctatttttttcagtttttcctgatctacttgagagaagatagggagtgcagctgaagatggaagacaaggggttagtcgaaaaatgggttctgctggagaagaggcagcttgcttggctatttggtcagtgagattatttccctggccttcaaataaaggattcctttgatgtcgtgggacatgtacaacagctatttcttttggcaattgtaaattttctagtacttgtattattaggtccctatggtctaaaatttgacctttgctgttaatgaggccccgctcagtccaaattttttcaaaagtatggactactccaaaggcatacctggagtctgtatagattgttgcttcttgatttgcagaaattttaaggcctgatttaatgtgaacaactcacatgtttgtgcagaccagtcatttggtaacctttcagactctatttctgtgagggtatctccatctatcgttgaatactcgttatgcctttttcctttgattactcgggaggaaccatctacaaacaggtgtttcccagtatgaaagggtgtttcatttagatcaggtctaacttctgtttgataactaattaaatctaaacatctgtgctctgggcaaagatcaggggtctgtgggttggggtttcctgttaagaaagcagctggattaattgagtcatcagtggttaagattagatcatctctttctaacaagatggcttcatactttaaaattcttgaatcaataagccaccttcctgccttctgattgagaattgttctcacttgttgaggagtactaatgataagatttccccaaaggttaattttctgctctcctctatgagcaaggctgttgctgccactgatgggacacactcgggccatccatgggctactgggtaaagaatttttgacaagaaggctatgggttgccaatggcctccgtgtgtttgagtaagtacccctaaggctacttcattacctacattaacaaaaagatgaaagggcaattctaaagagggtaaggctagaacatgggctgtcactagtaactcttttaatttttttatctgctgtatttcttgtaaaaccatataagggggtccaattcatcctgtgtaagttttttttatgtagaggtttggttactaaagcataagagtctctctataagcaacaataccctactaaccctaaaaactttctaagttccttctttgtctcaggatatcatatgaaggatatgatgccttcaatccattcaaatccaattctccatttgcccttactgattaagtcccctaaatacttgacttcaggttctacaaaccgaagtttgcttttttgacactcataacccctccagttgcaaattatttttaaaaaacctattgaaaatccttctactttttgtctatcctcccctgaaataaggatattatccatgtattgggagcaggcatatatatggtggtttgtaaaacttttctatgatctgttctagtatttgaccaaacaaatttggagattctgtaaatccctggggcaaaactgtccatcgatactgttattttcaaccagagtgagggtcctcccattcaaaggctatctttgctagtgggcaagcccagaaggcatcctttagatctattactgtgaaccactcatggttgtaaggaattttactaataatagcataaggattaggatcgacagagtgagttgtttgaactatttgattaatagatcgaagatcttgcactagccgatatgacccctctggctttttcacaggcagtatgggagtgttataaggagacatacagggttcaatgagtccaccatggagaaggctttctattgtgggctttaaattgatcttagcttctaagggaattggatattgttttctttttacctcttgccccaggtttttcaatttaacttggattggggaaatttgtaactttcctcagtttccttcctttgaccatacatctggatggatgtatccctcatttagagtagcaagcaaatttaaggaggggaggagatttccttgattaacacaaaggcctaggtttaattttagcattaagtctcttcctaataggtttcttcctgcctccaggattaacagaagtttaatatttactgagtggttctgatatttaatttttgtttcttcctaagacttttgctttaaacccctccccttttgctcccaaaataaaaagttcttcttgtgaccaagttacaccagggggaagataacaaactgaggaatcagcagctcctgagtcaattaaaaaggtctgggtcccacctctaaatttatcaaggagtcttggtgggactcgaggtaaaaagagtagagcccctggccccccattcctcctcaaagatcataagtgggtgatttctttttcttttttccattcagggcattctctttaaagtgaccttccttcccacacttgaagcatttattctgccctattcctctttttattcccttgttccctggtttgattcctttacctccattatagggtctggcagtcgggtacctaaaagatttaccagtgacatttctttgagctgtctattggggagttccctgctgtaagaacagcataatctttgccttgtccttttacttttcttcatctcttcgtacatacaccttttgggcctcccttaagagttcctctatgggacagtccttccaattttctgtcttttgtaatttcttggtaacatctggccagctatttgtgacgaagtgaagctttaacattccttgtccaagtgggtctcctccatctaaaccaagcatatttcctcatttgttccttaagcctgttaaaaaattccataagcccctcatcttttccttgctgtatattaaaagctttggtcatattctgggtgcagggtaacgattctctaattccttttattatcatttcttgcaggtctctcatattcctcctatgagctatgttgttatttatcccactgggaatcttgagtaggaaatttctgtttggctgcagggacgttttgaccaggaggatgctcacactcccaaatggtcatagcagccctatgcgtcatgctcctttcttcccctgaaaaaagaatgcctatgatggacattaactcagcccagtatacaactggagtcctaaaaattgatgaatttgatctgtcactacatagagatcgtctaagagtggcttgagttccctcttcaagctccagacttctgaactggtcaggggagcatttacaaaggcaatgccccctcctcctagagacacttccctcaatgggaagtggtttgtagctgaacccctagaagaagggagaaaatggaagttttggatatcatttttacattgttctaactcacgttgaagtcttcctgagggagggcattcaagctggggatgaccccaagaatcagggttataaggagggaaagaaaatctgagtaggggaaaggtctgggactgttatatctactggagtgggaggtgggggatgttggtctactggttggggggaagaaggtttggtgggggaaggtggtctaaggggtcccatgtgttggtggggttcttggcgtaaggggtattaatttcatgagaagtagtttctggcttctctcctttagtttttagatgacaaaggaggatgggcctttgccaccaacacagagcataatgtatttcctcctgggaaacaggacttttatcatttacatattctattaaaagctggcagtccaatcctcatttgacccgaattttggccagaaaactgaaggctttagaataggttccttggtccaaatgaaacaataatactttatcatctgttgctttttcttatgtttagtcctctcgtgtacttccaatattttaacatgagtcctaaaggactatcagaggtgatttcactgtctgccttttcctttttaccttctgtcttactcagggtatttcccatgttgaatactggttaggctcagtcccttgaactagagatttttcacctatccttccctggaggtttaacccctatcctggaggttccttgcaatcttctccttctgcttcgtccactctggctgctttcccagaggaaattaggctccccttagcatcagcgggactgtataaaccccaatgtcaggatccctacaagagggccaccataagccgtatgaggtgaccacagaaccacagattggactcactcactctgcacagcagtagtgcttgttacctttcacaccctttaacctccagaatatcccgaccaccaaggaaatactgttgcccttgtgactttttttaccttggtctgtgcacagttacctggtcattgcggtacttgcaggccttctccttccacattgctgagagcctggatttattcgtcacaatgggtagtctcagtctcccgtccctgggaccactgcagtggggcagtggggtgcacctcccctagatggggtgaccaaagaccccttcccaaagaagaatgggaatagtggatgagcccccagaaaattgttagaaataaagctcggagtcacaaagaaaacaaacacttgaacaaaggatttctcagcaaggcaatttttacttctgcagaagggtgctacccataagcctgattgccatgagagcaccagaacaaaggaaaacaggggtttttattcctaacgcaagttgtttctactattgtgtcctgtctccattggctggaactggaccacacaatctaaactgatcccagttggctaaaaacttaaactttcccaaataaggtaaaggtgcaatggggaacaaaggaaaggaggggttcacttatgggaaaccaggaagacaataatatttccaaataaggaaagagcataatctgcgagctgggacatgtctgggcatgtccaggcagatccaggcagactaggggacaaaggagttaggccttggttcaagtacaagaacatagaatgtgtttatttctttactgtatgtaacaactccttgggggcacaataaagaatcattagtaaaatagaagatttgttagtatgaagagcaagggaaacttaaaggaagcttttaagaggaactatcttcttaacacttatcattctaaaccaaaaaggaaaactttgaagaggaacttttattcttaacaaattttctctctttttttctaggtttgtttagctagtggtttatcaattttgtttatgtttttgaagaacaaacttttcactttgttgatcatttacatggtttttaaaagtctttatttagttctactatgatctttattatttcttttctgctaatttttgatgtgtttttttcttgcttttccagttccttgaggttcattgttatattgttaatttgtaatgtttctacttttcttaggtaggtatttattcttataaacctcccttttagccctgtttacctgtatcccacaggttttggtatgttgtgtttccattttcatttgtttcaagaaactttttaatttacatcttaatttctctgttgactcaatggttattcaggagcatgttgtttaatttccatgtattggtcttgttgccaacatttctcttggtgtatatttctagttttattccattgtggccagagaagatatttaatgatttcaatttttgaaaatttgttcagacttgttttgtggcttaacataggctctctccccgaaaacgttccatgtgttcatgaaaggagtgtatattctgtagtgttagatagaatgctctataaatatctgttagctttatttggtgtaaaattctgtttaaatccaatgtttctttcttgattttctatgtagatgatctgtctcatgctgaggttgggatgttgaagtctcctactattattgtattggagtctatctttcttgttagatgtagtaatatttgttttatgagtctaggttctccagtgtttagtgcatatatatttagaattgttctattcttttcttggaaggatctctttatgattacgtgatggccttccttatcttttaaaaaagttgttcttgacttacagtttattttatctgctataagtatagctactcctgctcacttttggtttccatagataacctcttgccattcttttaccttctgtctctatggattgtggtgaggtggtattaccggtgagtttttctataagcagaatgtagttagatcatgttttctacccattcagccattctaaatcttataagtggagaatttaatctgtttacattccagatttttattaatatgtgaggctttgtgccgagactagctcagtcgggaagaccctaacccagtggcactagaggaatcaaagacacacacacagaaatatagaggtgtgaagtgggaaatcagggatctcatagccttcagagctgacagcctcgaacagagatttacccccatatttattaactcaagccagtgataagcattgtttctatagattatagattaactaaaagtattccttatgggaaacaaacggatgggccaaaataaagggatgggtttggctagttatctgcagcaggagcatgcccttaaggcacagatcactcatgctattgtttgtggtttaagaacgactttaagcagttttcccgcctgggtgggccaggtgttccttgccctcattccggtaaacccacaaccttccagcgtgggcatcatggccatcatgagcatgtcacagtgctgcagagattttgtttatggccagttttggggccagtttatggccagatttttggaggcctgttcccaacagctttgttcctatcacattgttgttttcgggttgttttatatgtcctttattactgtctttttctcttattgcttgtcattatggtttggtggatttctgtagtaggaccatttgagacctttctcttcctcttttgtgtgattgctttaccagtgagttttatacttgtgtatgttttcatggtgataatgtggaaatgttgaaaatgtcgtttcaattccaggtttaggactttcttgagcatttcctgtaggccctgtctagtggtaatgaagcctttcagcatttgcttgtcttggaaagataatttcttttttcaattatgaagaatacttatgttttgtttattactcttggcttggcagttcttttccttcaggactttgattatactatcctattctcttctggcctgtaagatttctgctaagaaatctgctgttagagctgggcacagtggctcacacctgtaatcccagcactttgggaggctgaggtgggtggatcatgatgtcaagagattgagaccatcctggccaacttggtgaaatcccgtctctactaaaaatacaaaaaaaaaaaaaattagctgtgtgtggtggcgtgtgcctgtcatcccagctacttggcaggctgagggaggagaatcacctgaacccaggaggcagaggttgcagtgaaccgagatcatgccactgcactccagcctgggcagcacagcgagactccgtctcaaaaaaaaaagaaagaaaaaagaaaaagaaatctgctgttagtctgatggggtttcctttataggtgactaaacactttcctcttgctatttttaggatttgcgttttaccttatactatagaaagtctgattatatgccatggtgaggaactttttgcattgtatttttctcagaattattgaacattttgtatctgaatgtctaaatcacttgctagagttgggaattattcatctattctttcattaaataggttttctaatctgttctttgtctctttgcccttgaggataccaataatttgaatatttggttgtttatattgtaccaaatgtcacaaaggctttgctcattctttttttgtgtgtgtttttgtcttattgaattatttcactatgtatatcttcaagttttggaattcttccttctgcctgacctagtatgttgttgaagctttcaaatgtatttggaatttcatgtcatgaattctttaattccagaatttctgttttttttaaatctatatcttttgtaaacttcttatttgtatcctgaattatttttatgttttctttgtatttttttcagaattcttttgtatctcactgaacttctgtaaaatgaatgttttgagtcctttatctagaatcttgaaaatttctttttgattaagatctattgtcttccttagcggctttttttttcttttttgctttttcatgtttctgtgtcctaacgttaatatttttgcatctgatataacagtcagttcttcttatttttgaattttgtttcatagtggagagcattttcctgaagatgagtctatggtgttggttgcatagggtactttggatttgattctgggtgtagtacatagtagagtactatggcctctgtataatttctttggctgtagacagtgttaatagtatctgtgatttcttctgtgcattagggtgtggttattagtgaggctgtggtgaaaatgtgctggggactgagatgccacatgagacagtcttcaggctccagtggtggcagtggtgtgctgagtgttcctatctttgtgccccaaggtggtatatactggcatttgtgttggtggttactggtgggctgattcctgggcctccaggtggcttgcttggatggcagtagtggcagtggttgactgggtaggtgctggggacttcggctcttgggcagccagcttggcagtggcagtggtgggctgcttctctgggtcccaagcagtgtgcactgttagcggcagatgcgataggctgggtgggatgcccataggtggtgtttgcaggtaggtgacagctaaggtgattgcatccaacctcaggtacccaggaggagtgcacaggtgcccaaggtggtggattgggttgaggaattcccaggccctggggctgtgttctctgtctcagtgggagggggcgatgaagttgtctcttcatcattaaatgctgtgccaactagtcccttaattttctttttgcctagaggactgaaacatttattatagtttaggtctgctggttattttttcactccctgtatgtctaaaatccatttgtttgtttgtttgtttgtttgtttgtttgtttatttttgagacagagtctcactctattgcccaggctggagtgcaatggtgtgatattggcctactgcaacctccgcctcccatgttcaagtgattctcctgcctcagcctcctgagtagctgggaattacaggagcatgccaccatgcctagctaatgtttgtatttttagtagagacgaggtttcaccatgttggtcaggctggtcttgactcctgacttcgtgatctacctacctcggcctcccaaagtgttgggatgacaggcatgagccaccatgcctggcctaaaatccctttattttttgatagatatattcaaggtgtgttagcttaatttaatcattacatagggtacacatatatcaatacattaaacaatatctcacaaatgtattatactttgtcaattaaaactatacatatatatttgaaaaaggtattattttctgggaatagaatctagtttcacagcattttccttttaggactctaaagatgttgctcatctgtctcctcatttgcattgtttccaatgaaataactgctgtcatctttattattattcttattttttcactttctgctttttcaattttctcttcttctgtggttttcaacaaatacgtgctttttttttttacccagaattatagagtgaacgtgagaaacaatctctagggagggctttttgactattgcttgtaaatttttagaaacagttgtttgctccttgttttattagatcacaggctaatttcctcagagtattcttatattgaagaatgtcataattaattttactgatcatccctaaaaccataaaaaccctagaagaaaacctaggcaatacctttcaggccataggcatgggcaaggacttcatgactaaaacaccaaaagcaatgacatcaaaaaccaaaattgacaaatgggatctaattaaactaaagagcttctgcactgcaaaagaaactatcatcagagtgaacaggcaacctacaaaatgggagaaaatatttacaatctacccatctaacaaagggctaatatccagaatctacaaggaactcaaacaaatttacaagaaaaaatcaaacaaccccatcaaaaagtgggcaaaagatatgaacagacacttctccaaagaagacatttatgcagccaacagacacatgaaaaaatgctcatcatcactggccatcagagaaatgcaaatcaaaaccacaatgagatcccatctcacaccagtaagaatggcgatcattaaaaagtcaggaaacaacaagtgctggagaggatgtggagaaataggaacacttttacactgttggtgggactgtaaactagttcaaccattgtggaagacagtgtggcaattcctcaaggacctagaactagaaataccatttgacccagtggtcccattactttgtatatacccaaaggattataaatcgtgctgctataaagacacatgcacatgtatgtttattgtggcagtattcacaatagcaaagacttggaaccaacccaaatgtccatcaatgatagataggattgagaaaatgtggcacatatacatcatggaatactatgcagccataaagaaggatgagttcatgtcctttgtagggacatggatgaagctggaaaccatcattctgagcaaactatcacaaggacagaaaaccaaacaccgcatgttctcactcataggtgggaattgaacaatgagaacacttggacacaggggggaacatcacacaccggggcctgtcgtggggtgggggcagtggggagggatagcactaggaaatatacctaatgtaaataatgagttaacaggtgcagcacaccaacatggcacatgtatacatatgtaacaaacctgcacgttgtacacatgtaccctagaacttaaggtataataataaaaaaaaatttattggtcatcttggctaaagcatcgtgcctggataagtggtcaagcattattctggatgatttgtgaggatgtttgttggatgagattaacacataaatagccagactatgaataaagtagattaatgtctataatgtgagtgggcttcattcaattcactgaaggtgtaaattaaacaaaacactgacctcccttgagcaagatggaactctgtagcagacagcgctgggatttgaactgcagtatcagtcaactgacccactaacagctggttggtttgtgtacagcatttgcaagatgaatggacaacatactgtttggaagtccacctctttgatcaaagaaggtaaaaacagaaaagctgttgtggacttaattgcatggtgttttcttagcagtggtggaagaattgaacaatgataaagctcctacgttttagtttttactgacttacagggagtgactaatggcctggccgtataattaatcaggagagcaatgaaaaacttgcctatgaaaagaatgcccatgtgagccaagtcccacggaaatcactatggtaatttgaggtgttcattaatgtaagatctgttgatacctgatatagactggatgttgttcttgtgcagatctcatgtcgagatgtgatccccagcattataggtggggcctggagggaaggaggtggttggatcacgaggtcagtttctcatgaatcctttagcaccgtcccctcagtgctgttcagtgtccctcagaataactcccttccaggtttggaaggtgattgaaatcaacaagaatttatctccaagtgtttgccaggtgcacttgtaattccagctatgagagcggctgaggcagaaggatatcttgagtccaggagttagagtttagcctgagcaacatttgaggccaaccagggaaacatatcaagaccacatctcaaaaataacaacaaaaaaaaatccaggtttgcttgtggggatcacctgagtccatgaaataagtagacattggggctgtagcaatgcagagataggtggaatcaagacatagtcctcttgcattccacacatcacaggcacaaaatacatataagaagtcctttctttaacaaaaaaaagagagatagcatatggctatgtggcggattcttttatgggagggccttgaaaatacatagctggcaagttaaactgataccagtagccccaggaagcagcaaatgggtcttggcaggaatagatcctcaccctggagtggcctttgttcagctggtggtaggtgtgttaccaaactgaactggggtccattcacctggggcagtaaaagcaaacatccacactgagattgtagtgggacaaaggagggcatttatgtgtaggacgccaaacaaggagaatcaggcagctcacgcttaagacccaacctttttgatggctcacaagcaagaatttttaaaggcaggggcaaatttcgggaaagcagagttacaggcaacatcataaatcaatgcatacaagttacactgctttggccttaaaaggtagaatatcctgatgagggagcttacaggtcttaggtagatttaaagattttctgatttgtgatagataaggaagcaaagcttctttacacagcttccttacacagttgggggcagtagagaggaatgttcaggcctgttctatgggcttgtctctctccaggtccctcaggaagaaatttagaacaaagaacggcggtcagagttcaagttctcagtttcccctttataaggtctccctgtcagtggatctattaggagggaatccatgtttctgaaaaacaactcagggacaatatgttaaagatgttatttttagtttctacagagaatccaacatcttgtgactctaacttccttggctattgtttcaagctatcattccttcttgcttataagtcacagacttactttttagggctggctaggtgcctggaatttctcttgaaggaactgagtttttctttatttccagatcgggaggccccggcaggcttctaaaagagtccctgctttatctcagatgcaaatgctcgagtgttacaaaagaacttgaatgggaggtactgcaaccatgtggaccaccgagtcatatttctttacaccagaaaatgcacctgctcaaaatgtccaacaatggtcacagagagatatcctcctcagaggaagagttccatagagaattaaaatagtcaattgggtgtgtaaaggaaagagtggggaaacaagcacaaagggtgggcttatacaccttcatgagtgtgctcacacttgacatgagagtattcttctcttttcctggtggatcaggggaaggtgctgggtatgatcctatatatattccttcccaaggtgggaggacactggaatgatgactgtaattcacctcaacttgcttttctcatacctgatgcagtggtcccaggactagggatgcaaatagagttcagaaacaggaattattcctgagcaagaaactgtaaatatattttatgtccattatgtaataattcctaagggcctgtagaggtaggttgtgccttcactgcatctggcaaagttggggctaacactgaatgcagctatattgcctgggatcagatagccaaccagttctctacctgcataaccctaccctctatgaactggaatggatgacgggagacacttgctagaacagtattggtccctgcagtctcagccagcacagcagcagaagctagtgttccttccaaaattataaatgtttagtataaatgaagggaaggagaaatagtagctgagggtaaatgaatgaataaatgggttatgtaatgaggaaaatccaatgttacatgaactacttgaaaaaggtataagcaagagatgatattgtctcttagctcagttttacccagatgcctgaaagggtgcagccatatgttgctgaaactattcctgtttatggattgcactgggatcattgttaatgaccaaagaggattctggtaatgtgccaggatcttttcactgttatgattcttctggtgtaggagatctgtgattggccaggcacagtggctcacacttataattccatcagtttgggaggcaatggtaggaacattgtttaagtccaggagtttgagaccagactgggcagaatagtgagacccattcctacaaaatatttaaaaattagttgggcatgttggtgtgcacctgtaatgctatctactcaggaggctgaggcagaaggatcacttgagtccaggaattcgaggttggagtgagctatgattgtgccactgcattctaccctgggcaacagagcaagagattatctctaaaataaaataataaatattataaaaagagataatgtggtcaaaaccagggtgtgatctgtggtccagtaaaaatatttggtcttttccctgtttcctgacaaccaggttctaaaacatttgcaatctcctcagtgataaacatgacttcaacatggcaatgagatgactatggggtgaggggctcctagatagcttcaggatgggggctggttgccagaaacatgaagctgtgattagaggattggaactgttagccccatccctaaagtctgggaaggaaagagaggcttgaggttgagttcagtcacacagtggccggtgatttaattaatcatgcctacagaatgaaatttccatagaaacctctggagattgggtttcggagagcttcccaattgctgagcacatccgtgtgtccacgtgctgggaggatggtgaaccccatctccgtggggacagaggctcctgtgctcagagcccttccaggcctcactctgtgcacctcttcatctggctgctcatttgtatcttttataactgctatggtttgaatgtttccccaaaaaagcatctgttggatatttcatcccaaatgcaacatttttaagaaatgggacttttgagaggtgattggaccattagagctctgccttcattcatggactaaggctcattataaaaggacctgaagctgtgagtttgacttcctttccccccacctctcaccctctcttgtccttttgttttctaccagatagagtcccttgatctgggaattctcatcctcgacaccatgaacgaaacaaatttctgtttgttataagttatccagtctcaggagttctgctctagtggcataatttaaaccaggggtccttaacccccgggctgcggactggtacaggttcctggcctggtgggaaccagaccgcacagcaggaggtgatcgttgggtgagagagcttgagcatgacaccagagttccgcctcctgtcagatcagtggcagaattagattctcatagaagcatgaaccctattgtgaactctgcatgcgagagatctaggttgcatgctccttatgaagccctaacgcctgatcatctcaggtacaacagtttcatccgaaaccatttccctctgccctccaccacctccactaatccatggaaaaactgtcgtccatgaaaccggtcccaggtgccaaaaaggtggggatttaagctataacaatgaaaaactgcaatactgagtgtgaaaggaaaataaaatttcaggactccaaattcactataccaaagggaaaaattaagtttggagactgatggaaaaactgcctttcttttgttcctaaacaaataactgcaaagatagaagaccatatatctccccaggtggcctccctcacaaactgctcacaagataattccttgtgggccccaacgtgtttactctaaaacagttttgttgaattttcccctgacaatgtaaattaacagcttatcttcacaggtacaggacaaagacaagactagcaatcatccctccacccacccagagtcaaacgcatatttgacttttctacccaacgtttactttatcttatttaaaatgcagatttactgagcatgagatgaatgcatagttgactatttttttcctctcctggctgctctttcccctgtacatattgaagtcctcaaaagcctgttaggaaagagcatgggccacagatgctacaatgatttgagtctctgtttccaaggtgcatcttcagcttggcaaaataaacttctaaactgactgagacctgtctcagacatttttcggtttacacggctatagcaacttcctgagttctttgagttagtttaagaattctcaatccttgggaggtgagaaacccctgactttacagccatgttagacagaagtgcaggtaacctgggacccgatacttgtgacttgcttctgaagtgaggacagacttgtaggaatgagctggtaaacctgtagagtctgaggcgaactccaggtagttagtgtcagaattgagtcaaactctaggactcccagctgctgttggagaatcagaaagttatttgggtggaagaaaaccccatcaccatcccacagagagaaacttatagtaagagtaagcaagtaaacctctaccttcttcggtcccagaggaaaagataaacaaatgtaatcatttgtttcatgtccctaaacacaggttgctaccagctgttcattgtctagacgtggagtggtcctacctttaatctagaagttaggattttttaggcctttgagggtgtcacataaaaactaataaatgttagagattctctccccagagacatttccacacacaagaaaatataaatattaatataaaacatcgtgtggacccagaacctctgatatcttacaaacctgggagttttaatcctagtaagagtcatgctgagggaagatgtttgaataatcatttcatcattacagaatgccactccaataatctagactataaactgggatagacaaaaacttgatgtaaacctatcctcaagggaatgggtggaaatatgttatttattagtcactggttcattcagccactcttcgtgcctactgggtactagataaagttctcgtcctggatcactgctccaagaattaaaatttgtcacttttccccacccctcacactccagcacttgaaccctcttactacatcagaattccacactgtcaatgaaaagagtcaaacgcagtaacatatttaaagagatttattctgagccaaaaatgagtgaccacagcccatgacacagccctcaggagaccgagaacatgtgctcaaggtggttgaggcacaggttggttttacacatttaaggaagatatgagacatcaatcaaatacatttaagctatacattggttcggtccagaaagttggaacaatttgaagcaagcaagggttgcggggtagtgcttctgggttataagtagatttttaatttttctgattggcaattggttgagttattatcaatagaaaggaatgtctgggttatgataaaaggttgtggagtccaaaattctcatgcagatgacgcctccaggtgccaggcttcagagagaatagattgtaaatgtttctgatcagactgaaggtctgtgttgatggtaaatgctggtcaacttttcctgaattccaagagggaagagggcataataagacatgttcaatacctgcttcccttggtggcctgagccagtctttcaggttaacttttgagcaccctggctgagggtgtccattaaaatgattgggaaggggtggctttgatgtttatttttggtttacaacatgtaaaatgttgagaggagacagacaccacctccctccctggaagaggacaacaacactccagtcacccctgcagttgctcatggacatgagttttaagctccaccagtctgatgaccacctgctgaagaggtgtcattgtctcaggtaaatactaagtgttcgtcatctcacgccaagaagattaaggacactgacacacgaggagtgagttaggatcaaatggtttaataggcaaaagaaagacaaagggaaacagctccttcttgtgagagagaggggcacccaaaagggaattccagcctggaatgggagtgcatcggattttacaggcaggcttgaggagacggtgtctgatttatgtagggcccacaggttggttgtaccaggtgtgatatttacatagtgcgtgtggaaggctgttcaccccaccctcatcctattatgcaaatgggctttccacttggccggtgacatgttgtctgctccttactgtaaacgtgcctggcaaagagaagggaagatggagccgccattgtgaacatacccagtcccaggcgtcctattcctattggacagctgctggcattcacccgtgcaaacttccagcttacttgtctgtgtctgaagcttgatattacaggctgctccttgttagaaaagaaaataatttggagcctgctttccattaaaagccttgtgtaccctcactacctgtctaaataatttcttcttaactcctatatcactgccagactcagccagaatgaggtgacagagaggctaggactgtgcagaaagcattttagtaaagatggctgagtgacagtagtgatgtccaatttccatgtgcagcagtgacatctgtcctagcctcagggtccagtgtccaggaccagggtgtcagaggtgtgagcagtggcgtctgtgctcagcagcaggggtagttgttcctaggagggacctgatccagggtgggctgtgaattctgttcccggatgtgtagtttccagcctgcttctgtagccttccccacaataaaactagcccccaataccagatatacgactttatgtgtacattacagaaatgtggtttccatagttttctccaagaagtgagtgagaaatcagtctgcgggtgagtgtcagagagcggcattcagaggtgttctttgtgcgagagccacatcctgaattgtctacctggcctctaccccatggtggagagaacaacagagaatatcacctctcataactgatgatatacatcctcccttttctttctgtgagaaaaatcctcttttaaacagggtttgaaaacccaccccacccacccaccctgggcactctctgatcactgatctcagtggttcccaatctgtctgagcaatgggattgctggcggggacttagaaaatacacaggccactccccagaatccttgtctcagagtattatgcacaagaccaaggaatcatttatatgacaagccctagaggtgaggctgatgctcagacatgtgggatcctggagctcttgctactccaagtgtgatctggagaccagcaacatgagctccaaccttgtcataaatccagaatctcttgctcaactccagacttcctggatctcagcaccacatccaggtgatcctggtgcacatgggggttccttgtctgagtgtcctctagacgtgggaccagaactgtgcagtctgctctgggtgtggtctgatcacaccccttagaactggaggtccagggttcagtccttgtgctcattcttttccatagtcagtcactccctttgtgcctcatccatgcttgaggttttaagtctgatatatatggtgtgacctcctaaatctatttctccagcccagtcctttcccctaaactctggagttgtctgtccaaattccaccccagctcccccacctgccttcctagtagacatctcctccactgagtgcctgtgatgccccctcctcaggacgctcctgccagagtctccccatctccactgacagcagctccatccttctactcactcattttacaactatgggtgtccttgattcatctttctcacaccacagatacaatccattggcaaatgctgtgagtccatcttcaaatgcatccagaatcccctcacatcccactatttcccctgctcacgccccagtcaaggtaaccgacatctccagcctggaatactgcacttgattcctactgttttcccttctgcctccctcgtccctcgcctctcaattctgttctcagcacagccgtcagagagatccttttaaaacagaagtcatatcatggctctcttctgctcaaaactgtcctctaactccccatcccactcagagcaaaggccagatccaaccccactcccctcaagcccacctgttctggccgcacctctgacctcacctcagtttctctctgtccagccctcctggcctccttgctcttctgggaacacaaacaccttcctgccatagtgcatttggactggagcttcctctgcctggaaagaacttccccagacatcctcatgtctctcaaatctttcctcaaaagtcacctttgcaacaaggcacacactgactacccagcacaacagccaccttccctgtccccactgcccacatcctggatcacctgcctcacagcacttaccaccttctagcactttccttccttactctggttatagtgtatctatcgtctgcctcttcccactggaacatatgctacaaaaggccagagatttttcttttacttcagtggtgttccccagatgcagaaccattctgtcctatgtctggccaatgacaaaggtcagttgaatgaatgatcactgtagagcacctccctattttgaaggcagtatctttattaacatagcctcaggccaagtgctgttttgtggcagctacagcacaaggacccctcacactgagatagaggccgcctatgtttttctcagcagtgctgcttgtgtgccctccctccccatccctctttctacagcaaccccctccccgcaccccctgccccagcacactgcagcacacaatcaggttctctcttcaggaaagaacagtccttgatgacgggtccaatttcacagacaaatgtaagtctaaattagactctgctttacagattcctgagttgggattggattcagcaccaagatcactagaaccagggcagggagagagggcagaagagcagagcagaaaaggagctctagaagcagggcaggaggtgaatggctctgaaaatttgtctcagaatgcacagagacccccgtgtgcaggggccgcccagggcgatgtgtgagcctctgtggtcacagctcccactggacaagtttccactgaagggacaaggacaatggagcagtgaaggtgacccagctgaggactaaccacataaagcccatgatggactcaacaccaaatgggcacaggccccgtccacactcggccccccacagccttctccacaccccacctgcaacagactcagcacagcgaacatgcagattctggaaggttctcaggtctttatttgctctctcaaattccaggaattgacttatttaattaatccatcaacctctcatagcaaatatttgagaaaacaaatttatattcagattcttattttcagtagggaagtaagaagttgcagctcagtgcacgtaaagttgagacagagatggagacatccagccccacctctctggaacaagaaagatgactggggaggaaacacaggtcagcatgggaacaggggtcacagtggacacaagggtgggctgtctctccacctcctcacattatgctaacagggacgcagacacattcaggtgcctttgcagaaagagatgccagaggctcttgaagtcacaaaggggaggcgtgaagaaatcctgcatctcagtccctcacaagacagctgtctcaggctacagaaaacaacagtcatgaacaaattctggttagtcatggtaagtgatgacactctaaacagcccaccacacacgcgaaacatcccaatcaaagaatctccattacccaggcctttccccactgccccacccacccccagacccgccaccccacccactctagaccccaagaatctcaccttttcaagctgtgagagacacatcagagccctgggcactgtcgctgcctggagtagaacaaaaacaggacctggtcagagcccgcaggagacgtgggacaggaggaattatggggtgggtgagctcctccacactcccacccccatcacttacacgcagcctgagagtagctccctccttttccacctgtgggaagaaaatgccctgtgaggggactgggaggaagcagggccatgagatcttagaggaacctcctcgtcttggacccaaaaggaatttccagaagtatgactacagacccaaggcaggatcaggaaacacgaggaaagcaagtgtgggtcctggaccaactgccctcctaaggtctgtccttagcagggaccttcccctgactcatgaatgctggaatcaggaccccaacaccacaaccaccaaggtgatacatccgtccttcattgtcacatgtgctgcacaaaagagtaagtgctggcacacagggtcccaggctgcgttagcccctgtgtggatgctgcatcccagtaatgaggcagggaacacttctacctggggcttgaaacccccagtgggacaagaaaacccagaccccacccctcaccccttccctacctgagctcttcctcctacacatcacagcagcgaccacagctccgatgaccacaactgctaggacagccaggccagcaacaatgcccacgatggggacggtggactgggaagacggctctgggaaaggaggggaagatgaggggccctgaccctgctgaagggctcctgctttccctgagaagagatatgacccctcatccccctccttaccccatctcagggtgaggggcttcggcagcccctcatgctgtacatggcatgtgtatctctgctcttctccagaaggcaccaccacagctgcccacttctggaaggttctatctcctgctggtctggtctccacaagctcagtgtcctgagtttggtcctcgccatcccgctgccaggtcagtgtgatctccgcagggtagaagcccagggcccagcacctcagggtggcctcatggtcagagatggggtggtgggtcacgtgtgtctttggggggtctgatgggaagagtcagaaaattcaggcgctttgcatctctcatggcacaccctaggaccacccatgtgaccagcctgagaatggacaggacacctggggtggggaaggggcacagaacccagacaccagcggatgcaggcacctgggataatctcctattcattggaaagttcgagtctctgagcggggaacagggacttctgctcctgatctgagtggaggtaaagtgactcagaagtgctggaatcagagccccaaacacactgagtgtgaggcagagaacaaggcctgagaggaaaagtcacggttcccaaggctgctgcaggggtcaaaggggacccctgatcagtattctagggactgtcttcccctccatttcctcagagacgtcatcccttaattgtctagagagaagagggggccctcagaggaaactcaggaaaactcatgccattctccattcaagggagggcgacattctagcgctgatcccattttcctcctcttctcgtgggaggccatccccggcgacctataggagatggggaaggctccccactgcccctggtacccgcgcgctccagcgtgtccttcccgttctccaggtatctgcggagccactccacgcacgtgccctccaggtaggctctgtcctgctccgccacacgggccgcctcccacttgcgctgggtgatctgagccgcggtgtccgccgcggtccaggagcgcaggtcctcgttcagggcgatgtaatccttgccgtcgtaggcgtactggttatgcccgcggaggaggcgcccgtccggccccacgtcgcagccgtacatgctctggagggtgtgagaccctggccccggccccgcggtcagccccgtccccccgagccccgccccgccccgaccaacccgcggggattttggcctcaactgaaaatgaaaccgggtaaacgcgcctggggctctcgccggtcgagggtctgggcgggtcccgcggcctcagggaggcggatctcggacccggagactcggggcgacccgggccgtccgtgggggatggggagtcgtgacctgcgccccgggccggggtcactcaccggcctcgctctggttgtagtagccgcgcaggttccgcaggctctctcggtcagtctgtgtgttggtcttgaagatctgtgtgttccggtcccaatactccggcccctcctgctctatccacggcgcccgcggctcctctctcggactcgcggcgtcgctgtcgaacctcacgaactgcgtgtcgtccacgtagcccactgagatgaagcggggctccccgcggccgggccgggacatggcggtgtcgaaatacctcatggagtgggagcctgggggcgaggaggggctgagacccgcccgaccctcctcccggcgcggctcctcaggtcctgcgcccccgcctgcggtcccctcgctcctcccggcagaggccatttccctcccgacccgcactcaccggcccaggtctcggtcagggccagggccgccgagagcagcaggaggacggttcggggcgccatgaccagcatctcggcgtctgaggagactctgagtccgggtgggtgcgtggggactttagaactgggaccccggcgacgctgattggcttctctagatatccgacacccaatgggagtgggaagtggggatgcgtcacgagtatcctgggagaaggacccgacacaagttgggagaagaagtgaaactcaggggagtggggaatccccaacgctgcgcctccccattgcagacgcggccctcggagcctgagaccctgagagccccgtccgggacctgggacttcgtcctgatccctcttctcctacaccaagcctctttgtcacactgtctgcctgagtcctggacaaggatctgtctgtggaaaccagggagagacccccaggctgcgcccagccccttccccttcacttctcgtcctggaatccctgtccctgaactggactccctgcctcccactccttacctctcctcttggactcttgtgtagggaaactgagcacggggaacttgatgccagagagtgagctcgccctgggaatggaggtgtagagacaggggttttctctttaaacctggtgaagttttctctgaaggcaccgcatagggattctcatagagaccagtttcctttttgtttgttaatacagtaggtagcacaatattggtaatccctgaatgattagaattccaatttgtaaaagacctgtgtcaaaacagcattacaattaaactctcaaagctcctaagttttactttcccagactgtggatctgtaactctgggttgttgcatttaaaattatcttcattccccaccctgagtttccctgtgtgagtccagaacatctcctgaatataaagaagcagggtttgttactgtctattgcaaccgggagcctgtagtcatcacctcaaagttgcgagtgctccatgcagtcccaatgctcttcaccgacgctgaagcactgcctgttttcctgaactctgcacatccaagcagtgtgcgtattttatctgaacacttggtatttttgtaactcttttttttttaatcataaggagccaattagtttttaggaagtccaacaaaatgtattaaataccgaatgcaaagaaccctctgccaggctcttccactgctttagatttctttctcctgctccttttcctcacctcctgcctctccagcccttctgtctgcccctctcatccctcacacccccgctccccttagtccccgccaccctgtcactcctgaattgtggcactaacactgtccctcacctcctgcccatatctgttctccccacagtgctcagcagtcctgctaatgtgactcaggtcatgtcatttcttcacttgcaatggttgggttttggtctaccattttgctatacgttttcaatttgtctcatatctttttgtttctgttcctcctttactactttcttatgtgtcaaataaacattttttagtttatggttttaattctcctagtggcttttggctatatttctttacacaatagcaaagaatggaaacccgattccttgacttttcacagtgaagttcaggttatattaagctgcatccagcaaaataaaggacacttctaacagtgtagtttcttgtaacctaccattgtgctattattgttgtatatattacatcaacctatattatagactcagtgatacagtgcaatactttttgttttaaacaagtagccatatgtcttcaggaaattaagaaaatgagtgtgaatgtgacatgtgcatgtgcatcatttctgttgttaattgttcctttctgtatatctgggtcaccatctagtatcattttccttcaccctgaagcacttcctttaaaattaaatgtagtacaggacccctaggaaattaattttatggctttgattatctaaaaatgtctttatttttgcctcccctccccccgcccttttttttttttttgcttattagggcatttatgtgtaataaaattcaccagttttagctgcgcttttttggcgaatattggtaattatttatagtcatgtaactaccacactgcccagtagagaaacccagaatgcaaagaatcccctgctaggctcctccactgctttagagtcctttctcctgctccttgtcctcacctcctgcttccccagcccttctctctgtcctcttccctcacaccctcctctccccttagttcccaccacccagttacttctgagttgtggcactgtagagaaccgtttcttttccctaaaaactttctttctgcccctttctatttaatccttgcctcccaccctcaccccttcccttcactcaaccaccactctgttttctgtcactgcaatactgaaatttctagaatgtaatggacgtgcagtcgtatgttatgtagtccttcgtttggtctctcctttagcataacgatgtgtgagatgatgccattcattcatttttgttgctgagcagctgctgagtattgctggaatcccagcttattcattggtttctctgcctccagttgatagacatgtggattcctccagttagggtttgttattaatgaagccactataaataactgcttacaagtgtggccttacatttttatttcttttggataaatacatatttgtggaattgctgggccatgtggtaatagatgggtaactgtataagaaactgccataccactttacaaattggctaccacattttttgcattcctaccagcaatatcagacattcctattttttccatattcttgacagtatttagacttatccaatgtctttttaactttatctattctaggtgatgtgtgatggtttctcattgtggttttaacttgcacttctttgatgactagtattgtttgctgtcttttcatgttcatctaagtgacttattacatatattttatgaactattttgcaagttcagtgattaattccagagactttttcagaattccctagtgttttctacatatgcaatgaagttggtgacaaagacttttgtttcttcctttcctatctattgatcttttttcttttaaaattatttttatttggtagagatgaggtctcactatcaggctggtctcaaactcctgaactcaagtgatccttccacctcaacctcccaaaatgcagggattacaggcatgagccaccatgcctggtccttctattggtttcttatttcattttcttgccatgttgcactgatttggatgcctcttaggtgtttaaacaagaatgatgagagctcacatgtatgtttacaaggaacttaaacaaatttacaagaaaaaaaacagccctatcaaaaattggcaaagggtatgaacagacacttctcagaagaaaaaacatatgaaaaaaaagctcaatatcaatgatcattagagaaaagcaaatcaaaaccacaatgatgtactatctcctgcgagccagaatggcgattattaaaaagtgaggaaacaatagatgctggtgaggctgtggagaaataggaatgctttttcactgttggtgggaatgtaaaatagttcaaccattatggaggatggtgtgaccattcctcagagatgtagaaccagaaatactatttgacccagcaatccctttactgggtatatacccaaaggaatatcaatcattctactataaagacacatgcacaggtatgtttattgcagcactattttcaatagcaaagacatggaaccaacccacatgcccatcaatgatagtctgggtaaagaaaatgtggtagatatacaccatggaatactacacagccataaaaaggaatgagttcatgtcctttgcagggacatggatgaagctggaagtcatcgtcagcaaactaacatgggaacagaaaacctaacaccacgtgtcctcactcttaagtgggaggtgaacaatgagaacacatggacacagggaggggaacaacacacaccagggccttttggggagtcgggggtaagaggagggaacttagaggatgggtgaataggtgcaggaaaccactatggcagactatacgtatgtaacaaacctgcacgttctgcacatgtatctggaacttaaagcaaaataaaataaattaaataaaaagagaaagtgagtgacttacatgtacacatatgttcattgaagcactattcaccatagcaaagacttggaatcaacctaaatgcccatcaatggtagactggataaagaaaatgtggcacatatacaccatagaatactatacagccataaaaaagaatgagattacgtcctttgcaggaacatggatggagctggaggccattattctaagcaaactaatgcaggaacagaaaactatataccacatgttctcacttataagtgggagctaaatgatgagaacacatggacctgcagaggggagcaacacacactggggtccacttgagggtggagggtgggaggagggagaggatcaggaaaaatagctaatgggaactaagacttaatacttgggtgggtactaatgggtatagaaataatttgtgaaacaaaaccccatgacacaagtttacctatataacaaacctgcacatgtaccccttaactaaaaataaaagttaaattaaaaaaaaaaaacaaagaaagtgcatgtctggaaagagcgtatggttgggttctgtgtttttttaaaccaagtcacacaatctctgcccttcattggagtgtagattcatataggtttttgtcattattgatatgataagtttcacgtctaccatgttattttcccggtttttgtttctctgttcctcttgtcctgatcaatgactttttattagaaaccatagaaacaaaagaaagtagaataacatctttaaagtgctggaagacaaaaagatcaactaagaattctatatccagcatagatgtccttcaaggataggcaaatgagatatgtcaggtaaaaaaaaattaaaagaatttgtcaccagcagatctgtacaattacaattggtaaagaaaattcttcagactagaggcaaatgatacgaggtggaaaatgagattatcaaaaaagatgaagatgatcaaaaatggtaaatattgagctaagtgcaaaaggctatcttgctcccctcatttattcttactttatatacatagaactgtttaaggataagaaaaagttttttatcgtgggacttacaacctatatagatatattacatataatatctataccataaaagatggacattttatagaggataaatggttgcaatatttctatatttatgggcactagtacattattaactgaaagtagtctgtgaaatgttaagaatgagttaagttctgaaggaaattgagacactaaaaaccattcaaaagattgacaagtctcggagatggttttttgaaaacaaatcctagccagtcttgagtctcatcatcctacgatttcagaactatcgtgaatataaaagtaatcaaagaacagtcctgcccagaaagaggagttatccctaaatatggtgtccctgggacagctggccctccctgctggacctcttccacatggatgctttctgcagtgactttgttgtcttgctcttccactctacccagtgtcctgacccaagagaaaaggggtgtctgctgctgtgtccacacttggagaaggaaatcttgaaggtgtcagtacattacaagctgggcatgacagctcacccctgtaatcccagcaattcaggacgctaaggcaagaggattgcttgagatcaggagttggagaccagcttgaacaacattgtgagaacctcgtctctaaaagatataaaaataagtaaacttagctgggcacggtggtgggcacttgtattcccaggtattggggaggctgagatgggaagatcccttgggcttatggattcaagtctgtagtgagctgtgatcgcatcactggactccagcccagaccacagagtgggatcttgactcaaaaaacaacaacaacaacaaacattgtaaacctttgctcaccatgggttattttatttattatttattcagtgtgtattttgattttattttactggcagcacaataaaccaggacctgctgaaactaaaaatcacatccactttccagtgttaaaaagcccagtccaggcaggtgagaaggagacagtcctcattagcgctgaggattcagggagaatgagatgggctgggcaggaaggtttttttgtttgtttgtttgtttgtttgttttctatgaacaagtgtaactttttattatgatagagttgtttttattaaaggaatacatgaaaatggttaagtaaaatcaaatggctccaaaagtcttacaatgaaaacaacagtcctgccagttgttctctcgagaggcaagcacttttcattctcttagtttttcctcctggtagttaccttcatgggtttttccaaattattatttttttagtttttcaagtgggtgcatatattaatacatgtaattttaaaaagcctcttcagtttataatgcaccctaacagtcccctgccccatccctcctaattctccagagcaatgacttttaactcttttagcaatgtcttctatttttttctcacataactacttagtcatttcttgattattttatacattctatagtaatttcttgatatgacagatgaggatttagctcttacaccatcactaccttcacttttccccccatattgtcccaaagtagttaccagatttaggggctaagtagtcaccacatcattatgagtatgtacatattgctcattgttgagaaaaacagagtattatgctcttgcttcctgccttgtgcttccttctgccctagaattaatgattgcctaaccacccttcccccttgttttttttttttaacttttgctttatcttcaatgaactactttccaaatgccccaaatctggcaataacttattattatttttaagagaaggtaatcttactatggtggccaggctggtctggaaatcttgggctcaagccaacctcttgcttagcctcctgagtagctggaactacaggcatgggccattccacccagctaacctattaatatttttactgtttctttttaaagccagctccatagctggaatatttcctgtgttggatcctatttgctggatccatgtcattctctggtttgtctactccttcattttgctggagtattttctccaatagtttcccaacaaaagatacatggaggtaaaccctgagtctttgcttgcctaaaaatgtattattttaccttcacccttgattatttggctgaatatagatttattcgttgaaaataactttctttctggaattctgaaggcatggttccattgttttcagcttctttttcgagacaaggtctcttctgtcacccaggctggagtgcagtggcacaatcacaactcactgcagcctcgaactcgcaggctcaattgatccttccatctcaactccctgagtagatgggactacaggtgtgcaccacaatgcccagctaacttttgtattttttgtagagatggggcttcaccatgttgcccaagctgatctcaaggtatctgcctgtctctgcctcccaaaatgctgagccactgtattacaggcatgagccactgtgcctggccagtttttcttttattctctctctactttcttcctttctcaaaggcatctcaaactcagtgggcccaaacccagggcaaactccatcagaatatcctgctacttctgactttaaaatatatcttaaatcacagtttcttactacatgcaaccctttggttcaaactaccatcatccctcacttgaacttagaattggttttcctgcttctgtatttttttaaaacataaaatatttcaaataaaccatgcatggctttatactttttactacataaaaagaataaagatctggggtggctcaagcctgtaatcccagcactttgggaggccgaggcgggcggatcacttcaggtcaggagttcgagaccagcctgaccaacattgtgaaaccccgtcttcaccaaaaacacaaaattagccgggcatcgtggcacgtgcctgtagtcccagctacatgggagcctgaggcaggagaatcatttgaacctgggaagtcagaggttgcagtgagctgaagttgtgccattgcactccgtcagggtaacaagagcgaaactctgtcaaaaaaaaaaaaaagatatgaagagcttatatacttaaacatgaaattgctttaagtgtttgccattcaccgttcacatgcatgccagcagcttcttactgcaaacacctgggacttgctatagagcagctggagtacattctgcccacacacaggacagggagctgacaaccaaggagtgggggatcaatatgccagctttctcccctccgtttccctgtatctcagcagtatggagtttgttaccagtgagaacctgctcactgactttaaactggttttcttaccttctcagttccatttctccgtacctcaattgatgatttctgataagacctagaaaataaactgctttcactgaaattgcagtcttggaacctgctttgggttccccaaaagacagaaatatattcattttcccatcactggacttccaggttgttttcaatttttcactgttacaaacaaggctgcaacatttgcgtgcaaacctctgggtatacacgtaaggagctttcggtatttcccactagtgaaacttctcagttggagggtatgtgcatcttcatctttaagaaatactaccaacatttgaaaagcccgacaatgtcaaggactggcaagagtcccatatgcgatgggtgtggaatggcagctcactgtagcaggtgctggggactcagtcagggtcttggagaggcacttaattatagcaagaatatttcataagcggtatctgatatagtcaagattagtggggagtaaaaacatgttgcttagaaataattatccaaagatctaaagtcaacaaaagtctttttttctaatgtaaaaatataaacttttttttcagagggagggggaacaacttaaaataaaccagaaaacaccttcatattaatcattcttctcatatacttgaaatttgtacttaatacatccgagagaacgcctggatattctggcagaattttatatttctccaaatcaatttctggaaaaaacgtgtcactttcaaagtcctgcatgatccttgtcacaaatagtttaagatggcctgggcgactcatggcttccttataaacagaactgccaccaactatccaaatcatgtctactctatttgctaattctggttgttaagtaagttttaagatctcatccagacttctggcaagaaaatgagctcgctgtggaggttccttgagttctctgctgagaactaaattaattctatcctttgaaggtcgattcttcccaggaatggagaaccaggtcttcctacacaaaatcaccagattctgtttaccttctactgaagagattgtgtcattctctggaaatacctaaattcattcctgagcggcggccagggcaggtccccgttcttgccgatgcccatgttctgagacacagcgacgatgcagtttagcaaacgaaccatgacagcagcggtgagctcctccaagcccgctcgctacaccaggacgcgcggccaagattggccggaaggtttttacttggaaactggaggatgagccatgacatccctctctccacctcaaagctcgtcctgggcatccacctcctgggagcagaagcagcgcagcagcgccacctggtggtcgatgcgcttcctttgcagatcacgcacagccctgagatccacctctccttcctacgcaccacgcatttcttcactggacaccagcctgcgtcaatcttcctgtaaagcaaaagaagcgtgaggttggtgggggaggaatggtgttatctccacctttggcgagatccatgtcaccgtgttcaggggaagggccaggccttactccccatgcagagaggaggctctggccgtgaaggcgcctgtggagaggtgaggacccgctccctctacactgatggccaagagcctgcagatggcggggaaggcttcccttcagctgtgtcctatcaggttcttccaggagtccaggagtagacctgcatattgcctctggtgatgtgagctgcatgcacacctagaagtgaggtcaccccttctgggggtcctggggctgctggttgtcctgggtgctcagagggaagacggggagggcgcttcgtgcaaaacagtaaccatactctataaattattttttcattagcctttgtgtcataaaataaaatctaggactccaaaaggaaaaaaagaaggtccaaaatttgtgtcctttaataaacagtaaacacccattaaccaccaaggatagacgtttgcggagcaaaccagaagccccatcatttgccccagctcagcaataaactctttcctcccccaaataaaaatacatcctgacttttccgatcataacttctttgttctattttatatttttatcatccaaaactatgatttagttttacctttagaaacatgcttttgttctcttttattctatagattctttcttgaaatttatattgtgtggtagagcttcccatagtgtgcattttgctgattgctccccaagccattgtttgaatatgtgtttttattatctgtattgcctctaaattggtaattggctatggaggttagcttctattcaggcttgatttctttctcacttgtatttgtttgatggtgctgtattgtgttcttccatcaagaggaagaacctcacattggttttttttattgtgttgttaatcgctattgctgttcaatggttaaatctgttaattcttgatgggttgcaaaacagttattatagtctcagtctctcattccttcctcatttattatctgaataatttctaagtaagagattcaccctcctgtactgtttgtttactactagaaacttgctttttgagagactaagccaagcatctactcacctatgacccagcaatagcagtcttagttatcaaccaatagaaatgcatgtatgtgtgtgccaaaatatatgaaaatattattcatagcatcacgatttgtaaaatctggatataacacaattgtctatcaacagcgaagggacaagaaatgtgagttatttataaagtggagcattggacagccatgggagtgaataggctatgaccacacacagcaggatgatgagacccaggggcatgatggtgactgtataatgccattcaactggaactggcagaacttatctgtgttagaaatcaggagtggctactctagggttggggagggtggtttgtgactgagtaagatccagtgatgtttctgggaggctgtgattggtgtactttgatgtgggtgttgtttacctgagtgttcactatgtgaaactccactgcccacttgtggattgtccttctttctccacgcatgctgtccttcactcaaatatattttgctgatgttttgaagcaattctatctacgctaagaagaatcactcctactgcacatccttggaaatgctggattgaaaaaattagtgcaattgtttttaattccaggaaacaaatacatataaagaggaaaatctacaacaagagcagtaggtttgggagctgacaccagaacagctttggaaatggctctcgagccaggaactggggatcaaacccaaacaaacccataggaggtggggggtgtgaaatgatgtccaatagtgcatgaatgaacgagtcatgagcagtggctcatggcttggctggccagtcacaaacttgaggaaaatagagttggaaaactgggaggtagaggagagaggtacgcatagacctcttgctataggccgagtgtgtgacaatagtggttgtgtgtggatgcctaccagagggtctttaaggggatggggctccctgtaaccaggtgggtgagatggcttgatggacgatgccactcagccacacaggccttgctcatggagtccctgcataaagtggccgtggtggctgcgatggacactgcaagggcacagcaattgcgtcgccactcaccaaggctgacctggcagctgccactgctgagggcccagcccaccaaaagcagctgtttttttgacggagaaataaaacaggcaatggtaattaagaataaaataacattatgatagataaatatgccactaaagatatagtagaggtttaaataattttgagactatgaacaagattatggcaatggggagaacttactacaagtaaagaagttaaaacagttgtaaaactttagactgttttacacataagttctaccaaaactttgaagaaggttactgaacttatacgtaatattcaagagaatgaggaaacatagagaaagccagtaaactcattattgtttatgtataaataacattgattctaaagccagctagggaatacataagagaaaagcatgataagataatcacttctaagcaattagaggtaaaaatactgagaaaaatagtactagattgtgtccaccagtgaactataaaaaaattaaatatcctgcccaggttattcatccccagaatacaagaatatttaaactttaaatctgtaatgcattttaccacttaattaaagaataaaagacagagataatgatgttttattagatgcagaaattactgcagatgaaactcaacactccatctcacccacgtttcttcagttatctccacttctaagaacttgtgatcagtactcgctttggcagcacatatattaaaataggaatgatacagagaagatcagcacggcccctgcacaagggtgacatgcaaattcatgaagcattccatatttttaaactctcaataaactaggtattgaaggaacatacctcaaaataataaaagtcatctatgacaaacccacaaccagtatcatactgaatgcgcaaaagctggaagcattcccctttaacaccagcacaaggcaaggatgccctctctcaccattcctgttcaacacagtattggaagttctggccaggacaatcaggtaagagaaagaaaggatattcaaataggaagagaggaagtcaaattgtctttgtttgcaagtgacatgatcctatatctagaaaaccccattgtttcggctgaaaagcttcttaagctgaaaagcaacttcagttaagtctcaggatacaaaatcagtgtgcagaagccacaagcattcctatacaccaacaatagacaagcagagagtcaaatcgtgaataaacttctattcacaattgctacaaacagaataagatgcctaggaatacagctcacaagggaattgaaggatctcttcaaggagaactacaaaccgcttcttaagtaactcagagaggacacagacaaatggaaaaacactccatgctcagggatagaaagaatcaatattgtgaaaatggtcatactgcccaaagtaatttatagattcaatgctattctcattcaactaccattgacatttctcacagaattagaagaaactattttaaaattcatatagatgattgacattaaaggtaaaattaaaattaatatataaaataaaactcaaaattttcaagccatttggagcttgtcttgagctaatgagattaagctcatgtcctcaagaaaaatgttttactctgccgtttttaagtgtgcttctatggaaagagtttgagaatcattgatatggattatagaaaatcaggcttcatttaaaaataaatgtatttaatcttaaaaatagctttacttaaaatgtttattgttgcagacaagaaatcttatttgaaaaatcagaaattggacatgtcagtgattataggtttttttttttaaatctgaacatgaaaaagttttccccagttttaagataatttaccatgctattcaagtcagcctaaaattttaaaaagctactacataataaggtaggggttgaaaaaagaaatatttcagattcagagaattgtctttttttagtactaactaaaacatttaaaaaactacatttaatgatgtcattctaaattggctcagtaatattaaatgaggaatttatgttccagcaaacagtggatgaatgtgtctatggagagcattgtttcaaaatgttttaacaaatatatcattgaagttcttgctattttattcaatttcagccactattctttttagttgatttttttgtcaatcttaaattttcaaaagaaagattgttttcaaattattttatatttaatgaataaagttatacattactgattatttaaattgaaaaaaaattaaaataaaaataaaattcatacagaaccaaaaagaacttgtatagccaagacaatcctaagcagaaagaacaaagctggaggcatcatgctacttgacttcaaactatactacaaggctacagtaaccaaaacagcatggtactgatacaaaaacagacacatagaccaatggaatagaatagagaactcagaaataagaccacacatctacaactatgagacttcagtgaccacatacaataaagaatacagtctatacaaaaatagtttagaaaatgtaattttcacagttaccacattataatattgaaaatgtctagttttcaacttcaaaaaacatgagttatgcatgtatgaaagtatgactcattcacaggaaaagcaatagaaagaaattgttcctgaagaacaatggactgacttactagacaaagactttgaatcaactgtcttaaacatagtcaaagagctaaaggaaaccatggacaaataactaaagaaaatcaggaagactatgtttcactaaatagcagaaatcaataaataattgtgaaaaggaagcaaatggaaatctggagctgaaatgtatgggaagcaaaatggaaaattgactggagggcttcaagagcagattttagtttgcagaatgaagaatcagtaaacgcaaacataggccaattgaaattgcccatttgaggagcagaagggaaaaagtatgaagaaaaaagaacaaaagagatctaagagacaacatcaagtatatgcattttgggagttcccaaaagagagaaggaagaaggggggagaaagagtatttgaagaaataatgaccccaaacttccgaaatttttttgaaaacatgaatctgggtatccaaaacactcaaacatttaaagtagcagtaattcaaagatgtccacactgacagacattatattgaaactgttgaaagtcaaagacaaacagagcatcttgaaaacaacaagagaagggactcattgagtgcaaggatcctccatgagattaactgccaagtgttcttcagaaaccatggagttcagaagacattggcatgacaaacttaaagttcagaaagaaaaaaaaaacctgtctcaactgacagttgcatatttggcaaaactctccatgagaaataatggagaaattcagacatgcacaggtaaataaaagctgatggcattcgtgtctggtaaacctattctacaattaatgctaaaaggagtgcttcacactgaaataaaaggacattagatggcaacttgaagtcatatgaagcaaagaagtacacagctaaaagtaacttcataggtaaatagaaaagcaagtattttttggggggtggtaatttgtaactcctcttttgttttctctatttaatttaaaagaaaatgcccatcaaccaatgagtggataaacaacatgtaatctattctgcaatggaatattatttgaccacaaaaggaataatgtactgatacatgctacaacttggatgaaccttgaaaacatgtcaaatgaaagaagccagtcacaaaaggccatatattgtatgactccattttaataaaatattcagaagaagaaaatctagagagacagaaactgggttaatggtgccaggggctggtggcaggggagagtggaaggtgactgcttaacgggtacagagtttccttctagggtggtgaaaatgctctggaacttgatagtgatgatggctgcataacgttgtgcacctactaaatgttactgctttgtacacttaaatggtcacaatggcaaattttgtgtttacgtgcattttatcacaactaaaaagaggctggcaaatatattccaagtttgcttgggaatctgcccatctgtcttttctcctcaggatttcatctcttattcagagctcacccttgctcttctgcaagtagaaagcctcctttcatgcagggaccagccccacagggtcggtgggtctctccctgtgtgcggtgatgagagagtgtagaaataaagacacaagacaaagagataaaagaaaagacagctgggccaggggaccactaccacaaacgcacggagaccaatagtggccccgaatgtctggctgctctgttatttattggatacaaagcaaaaggggcagggtaaagagtgtgagtcatctccagtgataggtaaggtcacatgggtcatgtgtccactggacagggggcccttccctgcctggcagccaaggcagagagagagaggagacaaagagaaagacagcttacgccattatttctgcatatcagagacttttagtactttcactaattgactactgctatctagaaggcagagccaggtgtacaggatggaacatgaaggcagactaggagcatgaccactgaagcacagcatcacagggagacggttaggcctccggatagctgcgggcaagcctgactgatgtcaggccctccacaagaggtggaggagcagagtcttctctaaactctaagtgtgctaagtagtgggtgtttttccttgacacttttcactaccactagaccatggtctgcctggcaacgggcgtcttcccagacgctggcgtcaccgctagaccaaggagccctctggtggccctgtccgggcataacagaaggctcgcactcttgtcttctggtcacaactcactatgtcccctcatctcctatcgctgtatagcctggtttttcttaggttatgattatagagtgaggattattataatattggaataaagagtaattgctaccaactaatgattaatgatattcatatataatcatatctaagttctatatctggtacaactattcttgttttatattttattatactggaacagctcgtgtcctcagtctcttgcctcggcacctgggtggcttgccgcccacactttcagaacacggtccaagatcagccaggtccaaaccccaaaatgactttctgtcttgcttccaaatgctcagatgcaactctggggctaacttcaggggaagttaggagattatccaaataagatggttcactgggagaaagaatgtttggctttaatgttagggaagttatgtttgcatttctaaaaaggatcctgctcaccagtgaatatatggtttttgtctgtgcaggatggagttctcagcagaggaatgaaagacagccctaggaacatgatacacctcatgggtagctgactgacccacccatctaccacccccagctgaaggaagcagctagactgtacccttcacccatccttcagttgtattccactggacgtggaccctctacaagtgtggacattcctggatctcagttgctcttcctgctgttgaggagtctccactggtgtggctcatgcctagatgggctctgcaggaggcttagtgtctcccagttctcaaggctaatattcagtgaacccagaccaagcctcaaagtacacaggggctcagattttcatctatgaaatggaagaatccatctccctctttcaggtgttgtggtaattatatatatatatgtagacacacacatttatacatgaacacatacatgacaatccgtaatctatatattgatggtgttcttagtgttgcctttattgctcagctgaactctataaccaaaaattggatcatggattgtgaaggaagaactcatttcttttctctggtggagcactcggtagacatttctgccctttgggttcaaatgagaaagtagctttagcctgagggagaaagaagattatgactattactagtattataatagagataaggtcttgctatgttgcccaggctggagtgcagtgactattcacagctgtgatcatagtggactacgtccttgaacttctgggctccagcaatgttccagcctcggcctcctgagtagctgggactacaggtgcatgccaccatgtctggcctcatttcattgttattttacttcaaatgctttattttaaatgttaaaatatatgtttttatattcaaaagtgaaaccctatttgatcacagaagacgttaaaatgcacagacagttagaaacatcacctaggcctttctttaaaaaatcactgctattatattgttgaacctttgtagactgcagtgcaaatggtggtccctggagctgtcttgtgcagtggtgctgattttcatttcgttattttctatgtatgtatttttatatatgctgtcattttacaaagttgcattcatatgttaagggttatcttggatgttgcttttggaatgtattattatacaagtagttttccatgttataagctctgcataaagtttatacacttttacaagccatatctcatttcagataagaagatgtaacccaacttctttttttggatccgtctgccttcatttcgtcttgttgtaaataatgttttgacaagcatctttatatagaaagattcttctatgtttggaattttagaaaattcatagaatactcaagtgataaacattaggacacagacttttaaacatttttaattattttcatcacattgtcacattggttctctaaatcgtcatactgacatattccacctcacctttcaggacatgctaggactcaaggctatttacgcatctggaatcacagaggggtgttgggggtgaatgttgagtggaatcacagggtcttgagggcaactccctcagagaagaccattaccttttcgttagggaaagctggattaacctcgccaaatgtggttgaatgaaactggcaaataattctcagaggaatttaggagttcagtgtctttagcttcatcaggatctgcccagatgtccccattctgattttcagtatcgcgtttattcccaatcaatgccttcacttaaataacagatattctttaagtttgggatttgttttgtgttgtaatttagctacgcacagaatgagacgctgcgtttatttttcagaaatttcagccctgcagctacaggagattaggatttcattcaaaggaaacatagaaacttttaggtgatttatgtgactcatgagctggaagtttgcagccctgagttcatctttttctttccccattttgtccagcacaattggcaaaaattaactaatcaccttacaatagctagtttaacaaagtcttctaaggtctcaaatacatagtcacccagatcttataagtatttgattaggtctatccaatggtgatattctgagtattcacactctctgtactaatggaaatagagtcatttgtgcctttaaatccaaatagattagagaaacaattcaagaaaccccccaccaccaccaaattcagtgcattcattcttaaaattctgttccagtgtccctatgccccagtaagctaggctgggcatggtctgaggcttggtgggccaaggacagctggctcagctggggtgcactatgcactggtgggtcagcagcccagaatggtgctggatttatgggcaccaagcctattcgggagttgcacacactgagtcgggctccagtggcccctaggcttctaaggggcactctcctcctgctagtgccaagctaagctgtggggagcagcatgcctctgcatgctgcctgacaaactgcagccccagcccctgccacagacaccctggcctgtaccctagtgctttgtatggctgtggctattcagccgctacttctgatcccctaggactgggagcagcctgcctgggggagaccatcaggatgtctatggaaggctgcttcatgctacaagggcagagttaagtctttggtatagagactggttggcaaagttgaaaatgttgcctcaggtccttttggggattatttaccagcccctggtttgagtgttgtctggcaggacccaggctctgggagctgatcctccctcactcaaggcctgctgcagcctcccgctgaggtcttgaaaccatcaggagcagttgttctttggcctccgggacaccgcagggctgagttgctccctgcctggaggtggtcccatggggcccactgtctgggtcaagaatggtgcagagctggtgtcctcaaaatgcatcctggtggagccccagcagctgcaggtgctgactgcctctcacgaggacctgggggcctgcagctgcagcgactcacccagcatgagcggtgccactcagtgtgcacatgacagatgctccatcctcaggagatgacaaagacgtggaggacaaggctgaagacacaagtgcataatctcctactcacctcatctggcacattagaaacctgtcctcggctcatgcacaaatccacctttgggtggccaaaggctccagcttactacagaggccatgtgtactctgtgtaatcaacacaccccagcttcttcccacctccagtcatctcactgtatctgacatgatgccagcagattgtctcagctcaaattccagctccattacttactgctgtgtgaccttgaccaagtcacttaacctctctgtgcttcacgagcttccattgtaaatgcgtgtgtttacatatgccaagtacccagaaagatgcctggaacatggcaacacccaccacagaagtagtagctgcaattattgcctcattaaaacagtggagatgtcacccatcagggctagagagaatttgggaaatcctgatctgcttctggtttcaggtggggaaacctgtaggaccagcaggaacacggctgcctcagtgcagctggcacagggcactgccagcccagagcaactcagagctcagaacactctggggtccgaagtccgaactgctggggctcaactgtggcgtcagttatggaatgtggacccctccctagggagtctcccgggctcaaagtcttccctcaactccagaaattcaaacccaacactgacctcacggagaagttctgaaggttaaggaggagacacgtgaaaagtgcctggtggacaccagggatgccagtgagatgggggacaatggtgaggcagagtggaggggcaggtgcccccctcctcagtatgtctcccccaggtgctgtgaggacaggtggaggctctctccaggctctcacccggccacacaccagcgcgtctccaggttcctctcagccccggttacccccagccctgcagttaatccctgagctgggaaggagcccttgaatccaccctgtcctgtgtcacagtgtcgtccactcgggctcacattgccactaggccacttggcagccaagggatggagccacgttttgtactttctgaaacatggcttcaccttcaagtgcggtgatgacagtgccacacagaacaaatgttactgtctatcctcatcgaccataattttccagttttccaaccctcagggagcaaggaagagcatggcttccaccaaagggcgtgaggtcagcagtcataggggcaaccaacaggcaaagacccctgaaaatagaccccgcagggaagcacaagtattcactgacggtgggaaccccacagatctggctgtcttcaagcacatcagagagattgccatgaggagcaacttagccagaaagacttatttgcctcctcaaaaagcataaaattatgtaacataatactttaaaaatttctatcaacacaaaactaatctgggcgcagtggcttccggtgagccactgggacagacggcatcgtcaggaaggctggctctgtggtgcctcaacctggcagagcccaggatggtggtggcctccccagaagcacctggcaactcacctgcacagggccagggtcccagctccccacaccccagccaccacaccttcttctgcttttttttttccccattattgtttctttctttctttttctttctttctttctttttttttttttttgtcaaatctcaaggaaaaatacatagttgccagagggtggaaggtcctgttcattcacattgaaaagctcgggtatttctattagaatcacatgttttactttaggatgctgacgcctgtgtccatctcaacctgggcattgtgctgccaccttccagaagagaaaaactaggtagtgccttgtgaaggggcagcgtttctcatttccgacaacgtcagtcccacagccacccagatgagtagatgggggacacaggggaggacccagacctgctctcctcccacagcacattcttgagtcttggaaagagttgtgaaaatgccacaggtacaaacacctgcaggccactcccacagggacagctccgtgaggcggtgccgctcattcccacaacctcctgccacaggcaacacttaacacttagacagtgacccaaggccgaccagggaggacgccagccaggatgtgtcatcctcagctcttcaggacatgatgccagcaggggcaaagttatccctagcaacaagacagaggaagaaaggataacagaagaaaggacaatgtcacagtagcccccatgaccaacagagacggttccagaagcgcaggacaactccatatgcagatgctgttgctgtgcaattacactccaagaggggagtccagctggctctcagggtgctcgctgccctcagctgggggcctgcaggacatcaagtcctgagaatgccaggttctagtggagtaggatgaactgacagatacacagcaaagctccacatacttttccttttctttgtgcctgcaaagttcttcttcagtgtctctctcttttcagctactactgctggttggtttaaaaaaacaggacaatagtaaaaattagagacaagtgtttggccataaagagaaacactggctacctcccatattttcaagcgtgggtgatggttgtagttttccatctcaccttgtaggggatgaatccagaaaaagcttctgttacaaatcaaaatggacatgccagaagtattagctcaaatcaaccttgtcctgtctaaccactcagtgacccaaaatgccacttggactattaatctcaggggccagagaatggagctggagaaggagttgttagatcggggacaaataaccatgttatagtggcaataggaaatggaagaccatttgctcataaccactgaatcacagcaaggtgtataaacacacatcattgactgatagtttcagttctatgcccaagaaaatcatcgatggagtgaagtaattgaactatcacagaagatacatttgtattttttcttttttcaacttttagtttcagggggtgtgtatatatataatatttgtgtatataaaataatatatattattaaagaaagcctttgtacagtttgctggagccacagaagcaccactccagagcagagcaatgccttaaatcttcagtgttcatttgtagaacattcactagcagctacaaaagtgacttaattttcttctggaaataatgcttgcctgttgtgagatgttggaatatatatgaaccatcattacatgttaacatgccataaggagtttttgatacctgattcacattattagagttgcttcttagtatccatgtgaattttcactccaaaacacaagccagaagcttgagtgaaggacacctagggcaaatggtggctgaaagtgaggaagatccaaattactgttgcttgtactgtattaggaaaagaaaacaattcttctcttctttgccaattaaattcttaattgctaatttataattatgcttatatacatttcaacattttaataaagtattttttatggttagctataaaatttttaaaaagattctgttcctctagaaccactcttcgtaccacagtctctatcagtccagattcttcagagaagcagaatcaatagggtgtgtgtgtgtgtgtgtgtgtgtgtgtgtgtgtgtgtgtgtgtgtatttgtattcatattatgatatttattcatgtgattattagggcggtaagtatgaaaatctgcaggataagctagcaggctgaaaacgcagaaagaagatgttctaattctgaggcaggatttcttcttctctgggaaacctcagtttctgctctcagagtcttctactgatcgggtgaagcccatccacattattgatggtaattttctttttgtaaagtcagctaattcagcatggggaagggggtcatggtagacatgggggagggctggtctctccaccttctcacattaggctaacagggacgcagacacattcagatgcctttgcagaaagagacaccagaggctcttgaagtcacaaaggggaggcatgaagaaatactgcatctcagtccctcacaagacagctgcctcaggctacagaaaacaatagtcatgaacaaattcaggtcagtggccataaagcgtaacactctgaactccccactacacactcaaagtgtcccaaagaatcaccgtaatccagtcttgtcccctgtaccccatcccccttccacataaggccctccaggacgccacctttacaagctgtgagagacacatcacagccctggtcactgtcactgcctggggtagaacaaaaacaggacctggtcagagcctgcaggagatgtgggagaggaggaattatggcataggtgagctcctccacatccgtctcccatagttacacacagcctgagcacctccttctctgcctctgggaagaaatcatcctgtgaggggctagggaggagacagggccatgaggtcctagaggaaccccctagtcttggaccccagagaagtttccaaaactgtgacggcagacccagggcaggaaacatgaggaaagcaggtgtgaggactgaaccaactgcacggtatgtaaagacatacttggtacatagtagatacaaagttagctttggtctttggtgaattcatgaatatgattgtattaaaatgtaattgcattgcataaaaattataaaatgaagaataccaaaaaattaggaaagattttatcttatacaaggagtgtacatttcaattcactagtttattccaatagagaaaatgttatatgcttatctgttggcctatgtatgaattttctgttactgcataacatattaccactaactcactggctctacacagcacccatttatttctctacatttccttaatgagaaatccaggcctggtgtgaatgattctcagttcaggatttcacgaagctgtgtcctcatcttgaggctggggtcctccttcaagcttatacagagcttggtggcagaattcagtttcaggcagttgtgagattgtagtccttgttcctgggcagctgtcaggtggaggtggggtggagctgctctcaattcctggagcccgccatatcctttgccacatggccccttcattttcaaagctcacagcggaggaagcccctcacgttgaatctcgctcacactgtgaatctctttgctgaagaagaaataagttgttttaagagctcacctgattaggacagtccaaggcaggataatcatggccttaaagtcaactgatttgggaccttgcttatatctgcagaatcccttcacagcggcacctacagtagtgttgattgagtaactggggaaggtgaatcaccaggggtggttatgtggaggccatcactgaatcatcctcgcatagccaggatcttccttttctgtttaattgggtcacagtaggaaactgaagttcaaataaatagattgttgtgaatgttaataaaatacatcctattgatacatggaaatactgaaatcttaaaaccaaataacactgaatatcttttagttaatttagagtaaataaaaattaaagtgtagtaattcattctctcttttgaagcgctattgtctattgttgtataataaataacataaagtttgacaacccaaaacaacaaattcttatcatctcccacagtttccagtggtcaggaatctgggagagatttccttgagtgcttctggctcagggcctctcacaaggtttattgggggacacacctgtcagagaatatggggagggagccagataaccctgggaaaagtggcaggcccagaggcaaggctgactccagtcctggacaaaaggaaagaagggttgttggacgcatcctagaccacaagcaatctaaggagagttgagcaaggccatggaggagtcctccagccacagatggccaacagaggagtctcctgttgcccaggaatggtctgtcttagtgcccctgctgttacgtgtcagtggctgggaacagcccatgggaagcagggcctctgcaccaatgctgctgagaatgacagagcacgggagggaggccttgggaaatttcctggaaatgcggctcaaatcttcctcctgaggggtctgggcctttggaaatcaaacgctgtcagactgggttgctggacgattctgttcacatttacaatgggacaagggaaacaaggaagtccccaagtgaatctctgggttccacacaaactcctcctgcccttaccgtgtatcagcagccctgcctcgtcctggggatgagggtccatcactcctgcctggagaggaggggagtgctcttcttccctgcttgtctctaggcccatactgtcctgcgggcaactgtaatgtgtagctcaatgggctcttgtttgtccccttgtctgagtgcctccctgtggaaaaccaggacctcctatactacaaagcccagatttgggatatgagaagtccaagttccacagtgggtgaatataagggatgggacatgcagccacactctcttccatcccttggtttctggacccaagtttcttcctactgagaatacagcaccgtagtgatgtctctgattcaataaatgcaccgtgccctgaaagatggcacccattcctcagtgtttcctccaagctggttctgagttgtgcctgttgaaggcctgtccaatgttctgtgtggccggcagcccccgcagggtgcagatggtgataggatcagtggatcccctggtcatggtccatgctgcacccacttccatttccctgtgaggtgggtcccccaggaagaggctgtgctgagagtaattccaaacctgtggatcaggaatgtcagtggtgctggctgagagtctgagaatagtgggggaaaaagcctacccatggaggaagtttctgtcccagtgaggatgaatctctggcccttccatgatgaggcttaatgtggtcaatgtgtcatttagtggcactttgatcacctaaagaaatagtgcctaagcagggcacatcagggcctatcacgggtgtctaatcctgacaagttggatattcagaggtggcagcagctagttcggccttggtaggtgggagtctcaccttttggaggctacctatgggtccagcagcactgactcccaccgaccaaggccactgagtgacctggaaggatgggcacatgaagggagctattgtgattcctgcatgcatgttcccaccctgcaaggcctgagatggcccccagtgaaggctggctaacttccatttgtctgcttggttgttcagtgccacctcaggggcaggtattttctgggcagatggggtgttaacttggggtttgggctcattccacatggaccatttccgtctcatgatggacactgttgggcctgtccaatctataactctgtaggtcacacagaagccaattcatacaaccacttggaattacgtggttctcagtgtcctgtggtcaagaattctatctgatcagggccagcaacactaaaagttgcttcgagaaaggggcatatatttctgctgtggatgacatgaacttactccagaatcccaggccctccattgtgactttccccactgatgctcagttcactccatcctgcatctttgcccagccctgccacctccagcaccagggggtctgagggatggtggctgcctgcaccacagcctggatctgctgcagagtcctttcctgtgtaggctccacttgaatctggcatcctcctatgtcacccaaaatgtggccaaaatgatatacctagatgtggaatgtggtgttgtcagaacccaaagagattcaccaggcagtccgcttctctctcttttttttttttttctcactgaagatgaaagatgcaacgggtttttttttctgttttcttttgtttttacttggaagaaatatctctgcatgcacctagccactggacccataaaatttcactgcagttgccactcctaaatttctgtaagatttatcctcctctttctggggtgcatgtgttttaccaagacctccagcatactttccaccttctttctcatccatcccaatctatgatgttgccaatgaaatgaacagatttaatattctgtagaatgtccggcatctcttaagactatgttacagatgacagaagagttataatagctctcagggaaagtgtaaataaatgtggtatgaatgtgaataactccatatccactttctagctggaaaggaatgcactcagcaaatcctcggctgcacaccattggcctgcagcctcattaacttctgctagcagtgatatccagccagcatggcagctgcaatcaagaccactacttggtcaagtctgaagtaatcctgttcattctttaggtcctattgggcttctgcaaggacagaatacacggagataataggcaactccagcactatcccacctcctacagctctctaatggtggtgctaccccccacaatacctgcaataacctccaagacctgccctgggacgtaatatcgcttcggttgggataggggcagtttcagaggtttccctttagccttcagcgcaataagagccattaatccacaggttagagacgcggtgtgggggtcactccagctgccagtgcatcaatgccattatgcactcaaggaatagggaactaaacagggctgggactacgggattgtgagctataatgtgtcctggcctctggaagcccctctgtgatgggacacgatggtgctgtaggaatctgggcatcaatgttagttcacacacaaagtcaatactcacccaaattctgcctatttccctttcccggtgtacagtctcctgtgtaaatggctgtaggttcctttgcagaagagttcagggaattgacccagcatatactcccagggtgttccagggttcttcctcctagggatatggactcccctcctctgtcattgggatctgaatctgaaagttaggtgaggtctaggcattgagaacagattatgactttgtcttggatcaaacaccctcagcctcctgctcctcaattcttgctttcttttcatagatatcaagcagcgcccttgctggctgtccttctgttctgaacctgggacactgccctctgttaaccttccccacactccctgcaggtcaagcacaaccttgcctgctctgttggggttgtcatggtaactgtgacctctgacttttgcagatcactgccaccacttgatctagctgaagtagttctagctggaagaatagagaattaaaagaaatctttgtgaagccaccactcaggtttgtcaatttgtaacattttaatattattggctatatgtagtatacatagaaaataatagaaatatatgcagatagccctgattttccacagttctgttatgtatgtgtttcagtcgatactgtactgagtaaagcaaggactgccagtggggagtggcggatgtcttgaatttggtgaatgcctttatactgttacaaagtttttaaaatccctttgttttacatgattttagacttcgtataaattgttttttgttgaatgtatcattctgtggcttgctttatcatttaatatggtttatgaggtgaacccacacccatagaaacagttactttgttttcagttctggatagtattcatgggaggaatatcccacaatttatctcttctgtccgtgacctttagcttgtttctgttacagacactgccacaatgaacatcctgggtcatctctctctggtcccctgtgtgagttccccaagatatggatgtaggaatgggattactgtgcttttaccatgtggtgttataggatgtcaaattgttctctgaagaggttgtatcagctcccccctttaaaatcttctttgacattttacaggtcaagttctcttcctccccaactggctgctcctcctcagtcccccttcattggctccttttgctgtagatgctggagcactctggggtgttactaccttcctaatcactccggtgtcctccactctcaggattttaaatatcatctagacacagatggctcccaaatatatatctctacatatttctataatcaaaaaaataatggtaccaaaacaggtactctgatatactgcagatgggcctgcaaactggaaatgttttcaggaaaggcagtatggctatttctgtccaaattaaaaatgcatacacccagtagtcccacttctagaaatgtgtccaaaacacacctgcattcctgaaaaatgactgtattcagaattatatgttgcaaccctgtttgtaaaagcaaaaagaaaagaagaaagaaaatgacagataaaagaaaaaataatccaaatgtctgtcactaggggactggttaaaaaagcattgcaagctgggcacagtagcattcacctgtgaatacactctactccactctgggtaacataaggaggcctcccttcttaagaaaacccaaacaagcactgcatagctacacggcagagtctacaaacatttaacacaaaagaagaaagacatagaaaactcttgatattccctcatgaagaaataaagcaaggtgtagaataacatatagagtctgctaaaatttgtgtgaaaagggacaaaggatatatatgtacacatttatatttgcttgcatatgcataaaatatatttggaagaataagcaagaagttaatatccttggttgcctgttggggatgagacagggtaagagagagacattttaccttttgaacattttgaattttgaattttgaactatatcaagaaataaaagataattcctaaggagaccaaacaaacccccaaaaaattcaaaatgaaaaactttttaaaaactaatggaattttttaacctttatcgaaataaaatttaaaaattttctaaatattatgttattcctttaacaaggaggtttaccgccattttaattcagtacattgttttctttttaattgcatgatctttctttacatctatcttttttccattacaaggtaaaataacagcatgattaattaaatgcagtttgtttggtgaaggaaattttgttcaaatcttggtctaagtgggaaagggtttctaggggatccagtgcagcagttatgggtttcagtatgctcacgacgccctccagtgtttgtgtgggctcatggatgccatatctagaaaacactggaattctcaagcacacgtgactgaagccatttgccaaatgttcaaggtcctattaatggcccatctgagtacttgtcatacgcggtcaccctatctttggatcagaaggtacactcagagctcctagtgtcacatcccaggcccaacctgctgagattagtcgaggaaggtctggaggtcagtgtcgtgaggggtgggaagactgagggtgtgggggccagttgtggagtggcgggagccccaggtgctgtatgaagccgagcctctggatcaccctgtgaccccacatttggtcccttcctgggtgtcttccattcccaggactcccaggaaataaaatgctgcaagaatggggtggggagctgtccagggtgggtcaggtgtggtctcactgatcctacacctctgcctcccagcccactcccagccctcttctgatattagaaaccaacacagattgccttagggtggtggttctcaaagtgtggtcctgggggaagcagcattggcatcacctgggaacttagatatgcaatcttcagggcctggcctggacctactgtatcagaaactctgcatttaacaagcccccagcagaattctgcttttcaaatcagatctctctctctctctctctctctctctctctgtctctctctctctctctgtctctctctctctctctgtctctctctctctctctgtctctctctctgtttcaagtctcaatattgagtagctgtgacttctggatagtcaggtgtcagacaccctttcttgccaggaggcaccaggctcctcaatcagcttagtctcattcttggcctggcccagggaaagatgttcacttcctggattctgagcaaagctctcctatcctgggtgcctgtggggctcccacttacaccacaaaacaaagctcaaataatattattttcttttatgagatttttggtattccttcattagtcagagctgaagatctacatatatgtctaccaagcaagtgtgcatgtcccactagccagtttgttagtcttgccaatgcaccacaacgtagcagcctctcagtctctccttgtgaggtgttacctggagttctttgtctcaccaccaagagaattaaggagcatggatacaaagggtgaggttggagcaaaagtttaataagcaaaagaagaaagctctcccccacggagagggggcttggaagatggttgccatttttacagctgaatgcaaaggcttttataagaaactgatgagggctgggtgtctcatttgcataaggcatgaatttccggtagctccaccccatcctcctagtgcccatgcaggcccttagcttgagttactctatattgctttgtttccctgactgcccacgtatcgggggacagaattttccattgcgggcatgtctgggcaagtctcctgtgcagcctttcttatttgtgcagctgtgggcatgtcttaggcaagcccccctgtgcaagttcccttctttgtgcctgcaggctgttcttttgtttgaaataattcaactgaggacccaccataactgcccgcctgaccagtttcttcctttttcctctctcaatttgtgttatgatttccttactgatctctgcctgagcaagactgggcacgccttgagggcaaggagggtttatttcctcttatctcagtcccagctcctcttaaaacaacgccctgcacacagtaggtatttgataaatgtttaccaaatgaagggattgcctggaatggcttggcagacaggaaagcagaatgaaaacccacaggccaaaagtggctgggaaaagattttccaaatcctagtgatgggcacagggccccctaaagttcacttttggaaccttcccatctgtcttgttctcctttcatcagggacatccatgcccctcaaagcccccctagtcacacactacctttcaggaccaccttccagatcagccaggtgcaaatcccacagacttcctgcctgtggctccaaatgctcagctgaaattctgaggctaatttcagtggagttagaggcttatcccttaggagtggcaatggctggctttaagattcgagaagtagtgtttacatctcaaaagagaagaccgctccaccagaaatgcagaattttggtatgtgcgggtccggggtcttcaggagataaagaatgatagctccaggagcgctgggacccccgtgcagccaccagtcaccacagcctaggcaggggttgggctctcacctcggcccctcccctgcacgccctggatgtggatggtccccgagtgtgaactcgcctgggctctgaccctgggtgcccttcccgctgttgtggagcctctgcgggtgtggtgcatgcacagggggcttcacaggagacccggggccctttagagtctgaaggccaacattcttggagaatccatgtcaggcattcaggctctcagggactcagatgcccaaactatgaaaatgagagaatctatcccactctctcaggtgtggtgagattcatattatatgacaatcggtcgtctacacattgatcacactctcagtattgcctttatcagtcggccaatgcctaaaacccaaagacgggtcaggcatggtggaggacgagttcctttcttaccttctgaaggtgccatcaacaggaatttctaccctgtggagtctagaggagactttccttgaagctgagttgggaatggacatttggactttttttttttttttttttttgagacagagttttgctcttatcacccaggctggagtgtagtggcacgattttggctcactgcaagctctgcgtctcgagttccagcgattctcctgcctcagtctcctgagtagctggaattacagacacccaccaccacatccagctaattttttgtatttttagtagagacagggtttcgctatgttggccaggctggtctcgaactcctcacctcgtgatctgcccgcctcggcctcccaaagtgcagggattacaggcatgagccaatgcgcctggccagacatttggacttctttaaaattttatttcaaatttttaaaactttctaataggtattttatcttcttaggaagtaaaatctcaagtacagaaaatataaaaaggtataaagaagcagaaggatggaaactgccagtgtctccactgggaggatcgggatgaaacgttgcctggcagagcctcagacttcagagggaaggggcctggagctgtgctttgcagctgcccctgagtttccactcctggtttttgtgcatgcgggtgactgtgcaggatgacttagtgtcgtcatgcttatgagttattttgaatcttgcttttcaaaactttattatcaatacacaactttctatcatattacaaaatcttcttacacacagctttcaccagctgtaggctgtttccaaacagaggacctagccactcttcttttgcatgtttttttcattattgtaattaatatccttatacctaaagatctttctatatattggattttgttttaaaatcacagatttctcaataaaagttactgggtcaaaaggcatgaaatttttttttttttttgagatggaatctcgctttgtcacacaggatggagtgcagtggcgagatctcagctcactgcaacctccacctcctgggttcaagagattctcctgcctcaacctcctaagtagctgggattacaggcacacgtcaccacacctggctactttttgtatttttagtagagacagagtttcaccatattggccatgctggtctcgaactcctgacctcatgatccacccgcctcggcctcccaaagtgctgggattacaggcgtgagccatcatgcccggccgcatgaacatttttaagccttctcatacatattatcaaattacttctcaaaagcagtgtaccggctgggcgcagaggctcacgcctgtaatcccagcactttgggaggcccaggcgggcagatcacgaggtcaggagatccagaccattctggctaacacagtgaaaccccatctctactaaaaatacaaaaaattagccaagcgtggtggcggacgcctgtaatcccagctactctggaggctgaggcaggagaatggtgtgaacccaggaggcagagcttgcagtgagccgagatcatgccactgcactccagcctgggtgacagagagagactctgtctcaaaaaaaaaaaaaaaaaaaaaaaaaaaagcagtgtaccaattatattcacccatttactcaacccatatttattgagccccttctctgtccttggatttctagatgctggaaatccaagtggtgactagacaaggtccctgcctcgaagaacatgacaaccaatgaaacaaatgaaaacaattctaataccggtgataattgttatggagaaaatatgcttgagctagaaggttgatggtggtgaggatggtaggagatatagtctgttgatcaagatgttcctgggaatttgaacactggacgtctgagcagagacctgaatggtgtgaggggcctttggatccctttggatccctggggagcaggtgcacttggggagttccagtgggaggtgcctgagacaggattgagcagtgttagtggagatgaatgagctgggcccagaggggtgggatgagccagagtggccagaaggatcctgtgatgagggatgaggggctgtaaaacatagtgagagactggggtttcactgtgctaagaagggaagaggctggcatgtctgtgggacgcggaggcgaggatgagctctaattcccatttgaaatgctcactctgactattgtgtgggtgatggacagcgggtgtgagagtcagcaggcagcccagctggaaggccttctggtttactatcttggagaggatggccctggggaggaggcagtagaggagtgagaagtgattggatttggggttaatacatttttaagatggtgttagcaataactccttggagaaccacacatttatttgcttactttaattctacagcaacattcgaggtggcttactgcaacaaacccagtgtaataaatacatacgaattactttaaaatcaacgctaaggaaaatatacattttaaaagattaaggctggggtaaagctggaacattactaggcaggaaggaacatctgaaacatttgctgaaatggagttgaccctttacctagccatagatttgttgcctcacgatttcattgcatctgagcaccagggagggtggtggcagttcaggtcaccagtcccttgtttcctgattcaggaacagcgtcctgttctacacttacagtcaaagcaaattacatcattataagatgtttaatgatgaagtcaaagtccacagagtcagcaagcaagtgtaaaaacctcaggagtctaaggacagtctacatttctccccagaaatggcctccctatgtactgttgaagggagagggtcctttcaaggggctccaagacgcagaagcaactgggctgcagctcgaaataaagatgtcctttctacctgcaggttccacgaagcctcacaggcaactttggtgatctcacctgagctaggaattcggttttttgatgtgggttctctttgagccattgtgtgagctttaaaatgtgatgtggagattttgctatactggtgtttccttgccggaatttgacatccatggtggctctggcttccctgtctggtcccaggaggaaatggagtgtcctgcactttttttcagcttcgctttgtgtaggaaggatcaggagacctggagtcaggggttcctccaatctcactctcctccataaaacagtgtctcctaagctttctgggggtgagggccttgacaccgtgctgttctgatgaatataactgtcccagctcctgaaataaaagcacaggtgcacaaaatacctactgttgcaagcaatgcctaggtggggatgtttcctaggcgccaggtttagcactttgactttgtatgtacacacacaggggccaggcattgtggtttatgcctgtaatctcagcactttgggaggctgaggcatgagaattgtttgaagccagaagttcaagaccagcatgggtaacaaagcaagacccagtctctacaaaaaaaaaaaaaaaaaaaaagggtatatatatacacaaacacacacacacacacacacacacacacacacacacacacacacactgggtgtggtggctccagtctgtagtcccagctactcgagaagctgaggtgggaggattgcctgagtccaggagttggagcctgcagtaagctgtgatcaggacactgcagactgtcagagtgagaccctgtctcaaaaacaaacaaaacaaaaatacatacacacacacacagccagagccagcgctgagggagaggctggactcaggggcggggtcacaggcgtttctcaggtccttctcgtggtctttgtctctttttcctggaggtgggggactctgtacttcatgaggagaagttgtctgaagaaggtgggagatactcaggagcagggtccagagagggaaaaggatgaggaagtggagacaaagcagagggggcaggacaagaggagagcacgcaaggaatggggatggggaggaccttccagctgtcagaaaggtcacccgcagaatttggctcttggtttttctgctttatcaggatggatttgggaaaccagccggagtgggagataaggagtctactttgcaaaggacacgtgtgagcctcctcctagtttgaactcatgagtagcagctaacagccaggacccttgtgtcgggcacgtgaggcccctttgcaaccagggcgttttctgcaccccaccagccacccctcctgggaccacgctggttccctccaaccctaacagggagagaaggaaggagaggtctggagggtttgggtcctcccttgtgctccttcttcctctgccatttattccctgagtgtcctcgcctttcctccgctacctggaccccactacagtaatgcacactggcctggactccctttgtaaccaccaagtgggttcatcttgccggctacctagacgaagccgatttatcaagacaggagaattgcaacagagaaagagtaattcatgcagagccagctgtgcgggagaccagagttttattactcaaatcagtctccccaaaaactctcatcagtttttaaggataatttggtggataggggggccagtgaatcgggagtgctgactggttggctccggtatgaaatcatagtgagtggaggccattctcttaggctgagtcagttcctgaacgtgggggccacaggactggttggcaggtccagatggggccctccagctgttaaaaatacaaaaacctgaaaagacatctcaaaaggccactctgaggttcacaatagtgatgttaccttcaagagtaactggagaagttgcaaatcttatgacctctggaataatggctggtaatattcagaattccagcccctctcatcctaacttaatggccggtggcctttcttcgttttacaagaacagtttccctttaaactataaactaaattccttcccaaggctagttcagcctacacctagaaatgaagaagggcagtttagcggttggaagcaagatggggtcagttaggtttgatgtctttcactgtcatcatttccttagttataattttgcaaaggcggtttcaccttggcttcagccccacccatgcagtaacactgtgccctgtccttccaatcactgccactaggtggaagcagagcgtgcatcgcccagatgggctagattctcacaggctcactgctagaacgaatattcttgagactttagatctgaaagtcagcctgatttctgaaagccttggaccgtttccaaaatcaaatcaatactccaggaacaagatctgcctcgactttgcctctacccaaggacgctatggcaacgcagttttcaaacgtgctttgagaataaatggaacagggtcccctgtgtccccactcatttgcgttttcctttttattacagccaaccgcttttgtaaatattgttacacatctctctattccactgaaaacatctctttcaaatgcactttaagaaagattcaatgccatgaaaatatgaaggatcctcttgaaagagagtttctggtggtgggttttaatgaacattttcttttttaaaactctgtaactatttcgttgtggggcttagcttcatattttcaaactgaaatattctcttccttaacctccacataaatccaagtttataatttttattattttaaaattttatttatttttctgttttggggacagggtctcctcctgtcactcaggctggagtgcaatggcacaatcatagctcactgcagcctggaactcctgggcttaagcaatcttcctgccttcgattcccaaagagctgggattatagtcatgaaccactgcaatccacccaaatccaagtttacactaaaagataaaattccaacattgtaggggattggtcaggtggtgggaataattataaagataaagttataggaaatagacacaaaccttcttggaaagtggaaagttttgcaaaagcctcaggatagggttatagctgaaagcagcctaatccccttaccttgagttaatagcttcgagtaagtacaaagacatgtaagagagtttatctaaagagcatgtttacctttgatcatttgtaggactgctctctccgggggactgcgaccagattaattacccacaggtgtgttgactcaaagcctttgtcattaaatctgtgctgaataaaggcccacagggccagatagtcagggcacgcagctgccacaaccctttctgtgagtggcctggccctctggtgcactctttcactgaatatcggtgtctgagtacattattcatccatcgtgcagcctgggtctgccggtcagaccctggcacaacatttaagaggaaatgaaagtcacaaagttatcccagtctctggagtcactgtcaaaactttggtgaggaatcttccaggttttcccctacttcaaatatatattaatattatgtaagtgatattagtggcattttcgcccaggctggaatgcagtggcatgatctcggctcactctaacctctacctcccagattcaagcgattctcctgcctcagcctcccaaacagctggaactacaggcacccaccaccacgcccggctaatttttgcattttcagtagagacagggtttcaccatgttggccaggctgatcttgaacttctgacctcaggttatctgcctgccatagcctcccaaagttctgggattacaggcatgagccactgtgcccagcctccttaaccttttaaaaaaggttaaaagtatgctgggcacatcttttcatagcaatacttaaaattgctcttactctttttaatgacaacatagaattttatcgtgtagctgttctttgggagacgattaaaatcttctttatcttcactgtggtagtggagatgtgggtgtgtacaacagctaaaattcaacaagttgaacattttaaatagatgcagtttattgcatgcaaagtatgtcccaataagatgatttaaaaatattatcctctttgagacttgtactttgcttatgtgaaacaaaacaaaacaaaaaccctgttcttgtgcccaggagacacaccctgacacatctggaggtagagggtcatgctgtctgcaacttaccctcacaggctctgaaataacaataatagcagcatatttacagatttagagagagagaaatttgtggtaaaaatgttcataagtaaaactagataaagggcaaaaataaaagaaataatgaaactacgtcttttaaattttctctctccggccgggtgcggtggctcacgcctgtaatcccagcactttgagaggccgaggcaggcagatcacgaggtcaggagatcgagaccatcctggctaacacagtgaaaccccgtctctactaaaaatacaaaaaattagtcgggcgtggtggcaggagcctgtagtcccagctactccagaggctgaggcagcagaatgccctgaacccgggaggcggagcttgcagtgagccaagatcgcgccactgcactccagcctgggcgacagagcaagactccgtctcaaaaaaaaaaaaaaaaaaaaaaaaaactctcctttactttttctctccccttttcttcctatctcttccctcatttcttcaacacgtccccccatccttccctcttttctccattctctgcatttgatccccggtatattccagcctccaggccaacaaacttctccgcgtccgccgggagcaggtcagggaagggacgcgaggcggcgctgtcaccgcattctgagcgccgcagctccctgggccccttgtatcatttcagtgaaggtcactccagtctttcatggaggccaaactaagggtgtaaattaggatcctcactgaagtggcgggaccctaagaggctttttcctggccccttagttgtgggttttcctgcgggcggcgcagccggtttccatcagaaccgcccagaggcggacgctgccttcctggggtgacggagcagcaggaagcgttttcggatcctggaatacgtgggcggcccgtgggaggggctgaggcgcagtttcctactcacccggatccgaatcctccgcggtgctgtttcaagaaagccggattccagatcgcgctccagcccggactcggaattcctgccctgcgggtctgcattttcataacgggcaggtgtgagtgccctgcagctggagaccagaagcctgaaggcagctcggccctccccagcccacagcgccgttattccgtttctatatcagtaaacacatttcattttccgtagaccagggcggggtgacgggtgatcccagtcctcgcagtgaattccgggcagcaaaattcaaaacacatgcggccaaggccgggcacggtggttcacgcctgtaatcccagcactttgggaggtcgaggcgggcgatcacctgaggtcgggagctcgagaccaacctgaccaacatggggaaatcccgtctctactaaaaatataaaattagacgggcttggtggtgaatgcctgtaatcccagctagtcgggaggctgaggcaggagaatcgcttaaaccttggaggcggaggttgcggtgagccgagatcgcgccattgcacttcagcctgggcaacaagagggaaaactccgtcgcaaaaactttcgggggcggagcggagccccgccctgggttatgtaagcgaccgcgctgggccgtttctctttcttttccggaccctgcagtggcgcctaaagtctgagagagggaagtcgcctctgtgctcgtgagtgcatggggtataaggcaagtgctgagggagaaaacgtagttgatggggtagagcagacggggttggaggtggggtggagggggagggctttggacagaagacctgggaggcttggtgggggaggggcgcccaggcctgggcactaagaaacaagtcccctggagctcaagaccatctcggcctcccctagcccaagagaggactggcttcatgactccctgaaaccatttctaaatgccttagaacaaaccttgcatattcattattgttattgaactattaaaagtcttttttgggggcgagctgaatcagatcctttgctggagctggcacacggaggaagtcctggagggagggtagacaccgtggaggtaagggcttgggacctgtgtcaggagagctaggtccatctccctcccagtctctcactaggcttatgatctttagcagtgaaaataatctctctaaggtggggaaaggaccccggtccctgctgtgctcaataaattatgaggatcaaaataaattatcagtgaatgtgaatgggaaaactaagaaattgttaaaattctcgaatacattacattttcatccacagaaaagtataggctagggatcatgggggaatagttagtaatgacagggatagttgaacttaaaaaaaaagtttgtgaggctgacaaagaagaaacggacacatttcctgatcttggagggttcatagggtagaagatggtagatgacagctgggtgtggtggcactcgcctgtagtcccagctactcaagaggctgtggtgggaggattgcttgagcccaggcattcaaggctgcagtgagctataatcatgccactgcattccaactgagtgacacagcaagactcctctcttaaaaaaaaaaaaaaaaaattcatggcagggcacaatgagtactatcaggaaggttcaaaccacgggctaaatcagtagttctaaaacttgactacacatcggaatcacctagggaactttaaaagatactaagatttaggtccaacctgggtttactgatttaacaacctaggttgtggctgtggcctgggaacatggatattaaaaactctccaggtggttctacgcagtggctaggtttgatgacctctgcctagatgtcccaacgactaagagatgtgcgttggggacaaggcaattctcttagtagaaagaggctttcgggacagcattcttattattgagaattgagaattcatatgccacacaatttatccttttaaagtgtgcagctcagtggcttctagcgtaatcacaaggttgtgccaccgtcaccactgtctaccctggaagattttttttcctttttttcttttttcttttctttttattttaaaggctagtcaagtgaaacagtgggagtgaagaagaaacaaagacatctataactggttgtgatcaattagttgtaaacactgcactcagaccagcctgggaagattttaaggatatggtgtggtctgatgggttccaaggcagaggttacaatagcctggaagagggagactgcttaggcagtggcatcctggtgggatagggtgaggagatcccagagcccacgtttactgcaaccctggggagatgtcaccagagaaatgggggtggtgccagacagcagattgtggcagctgaggttttccacggtagagtagaagcatccatcatgtgtgacattcagcagatggggcgctgtgggtggcttggagcactctggttgtaactgaggcaggcaccgtgtttaggaaggctgtgcagtaatctaggctgaagggaggggaaagcctagactaagattgtggctgtgggattgaaatagcgttgaaggagctgactttgactcccggagatgatggggaaagaggaaatcagaagggaccaaggatggtgatgttcttaagagaaactgaggaggaagagaggatgatatggtggcagacgtatagagagtctttgtagatctctcacattggaggggactatggtcggaggtacagatgtcctaaggcaggctggaaaagggagtctggagagagcttggtgttgtagtgaaccacagggagccgcctccttggccctgtgatcacccagggactgaatagagaggcggccctgggagacttcagacacttagaggatataagggggtgaaaggggggcctggctttgagtcaaagggaggagaaggagattataaagctgaaacgtctaagagagtttgtggtctgagcggttctactgcggcaggtgcttctgagaggcagaggtggctgagatctggaaacaggtctgcaaatctggtcactggtctcattgccagtaacgctgtgcgcggttgagggagtgtgttgggagaatagccacgcgttgtctgtcctggaaggaacaagccagtgagagccggtttaatggggcggccggcgaaaggggcttggtgaggcccgcgctcctcggggtgggggcgcggggatgggtggtcgcgatgccgggagggcaggcagggccctggccgtgcttatgaagttggagctgtactctcagctactcgaagctggtccctgctttaggctgcgctcccgcgtgctccccattttctgggccccaggtcccgccttctaaatctccccaggtctccagcccactggaattttctcttccaagcgtggccccgccctctccgctcgtgattggccctaagttccgggccccagtttcattggatgagcggtcgggggaccgggccaggtgactaagtttccgcggcgccttctccccggccactgcttgagccgctgagagggtggcgacgtcggggccatggggctgggcccggtcttcctgcttctggctggcatcttcccttttgcacctccgggagctgctgctggtgagtggcgttcctggcggtcctcggcggagcgggagcagtgggacgtttccgggggtcgggtgggtagcggcgagcgctgtgcggtcagggcggggctcctgtgccctgtcggtggcgcagggagctggacgcggcccgttaccgccacacttcagccctgcttccccgtcacttttcagtcctcctcgggatcgcgcatcacctgcactttctggtctcctcctgctctttctctcctcgcgtctcctccgcttcctctcacttttcggacaaaccagtccttctgaggcccatgggttcccgggctgcctccggggctgctcctgtgaatggcattcgagtgcccttccagcgcggccactgaagcagccacaacccccggtgctcggggcggctctcaggtccctgaagtcctgtcctctcccggagccgacgtgttctcagctcctgggccgcagctcctggagtaggggccctcctttctcgggacccggagctggtgcttcctgctgctgtggggactgtggggggtcctgactctcaagctgaggggttggagtctgcaggctccgggcagaggattcttcctgcgacttctctcatccccagctcattctcccctcgcctctggctccgagggtcctctcctctctctcatcccacccctactaatgaccagtgatctaaggacaccagattccctctcacctcctccctgcccatctcagggcccgctgagtccttttgccctcccagctccctgctaccccttcctgtgtgctgttctctgatccatttctagggtgtcctctgccctcatcccctgtccccgccaccgaagtccctcctgcaccccttatgggcctttcctacaagcagccttcacccagtgctgcccctatgcctccccgttcccaaatgtccctgactctaactttctggtgctgccttttatccgggggggtcttccctccatcccactcccctccagacccccaaggggaaccctgatgctaatggcagttgggccttaggcagggcgcagggcagcgcagatgccccctcccctccagtgcagatgcctgttctggaccctgcctcattgtggccccttccccactccttcatcctcagcctcaccctcttgaggaccccaccctccagcccacaggtgctggaccatccctccctggtccctccgcccctctccaccttgggaccttgtgctgctcctatctcttgcccagctgccttgggccctcagcacgttctcatctttcagtgggaaagtgggagtgctggagcatatgacagtgctgagcatctttcccaagccccaccctcccccagagcaccctcccctcctgtcctcaccctaccccaagttctcccacagtcactcctgccccatgctcatgccgccctccagttcttgctctgcccatctcccctccccaacccagacctaaaacaggctgttgggccaactgttccttgaccttccttcttttcttttggttccttgaccccagtgggctctcactccccacaccgcatatctaaaatctgttttgcctgctcttggggtgccactgctccccctccagcattactccttttggcaggtccttcctcaggctgagaatctccccctctaccttggttttctctctctggccagcacccccactccttgctttgtttttaatttttaacttttgtttgggtacgtagtagatatatatgtatatatttatggggtacatgggatattttgacacaggcctacaatatgtaataatcacatcagggtaaatgggttatatcacaacaagcatttatcctttctttgtgctacaaacaatcccattatgctctttcagttatttttaaatgtacaataaattattgttgactgtactcaccctgctgtgctatctactagatcttattcattctaattatatttttgtacccattattaaccatccctgctcccccactccccactacccttctcagcctctggtaatcatcattctattgtctctccccatgaggtccattgttttaaattttggctgccacaaataagtgagaacatgcaaagtttgtctgtctgggcctggggcttatttcacttcacaggatgacctccagttctttgcaaatgacacgatggctgaatagttctccacatacacatgtacaccacattttctttatccatgcgtctgttgatggacacttagattgcttgcagatcttggctactttgaatagtgctgcaataaacatggaaaagtagatagctctttaatataccgatttcctttctttggagtatatgcctaacagtgggagtgctggagcatatgacagctctattgtatttttagtttttggaagaacctccacattgtttcccatagtggttgtactagtttacgttcccaccaacagtgtacatcctcaccagcattccttatttctacatcctcgccagcattccttattgcctgtcttctggataaaagccagtttatctggggtgggatgttatctcgtaggagttttgatttgccttcatctgttgacgaatgatgttgagcaccttttcatatacctgtttgccatttatatgtcttcttttgagaaatgactattcagatcttttctcatttttaaattggattattatattttttttcctatagttgttcgagctccttatatgtttcagttactgatcctttgtcagatgaatagtttgaaaatattttctcccattcttggatggtctcttcattttgtttattgtttcctttgctgtgcagaagcctttttacttgatatgatcccatttatgcaattttactttggttacctgtgcttgtggggtattactttaaaaatctttgcccagtccaatatcctagagagtttccccaatgttttcttgtatagtttcatagtttgaggtcatagatttacatctttaatccactttgatttgatttttgtatatggtgaaagacagggtctagtttcattcttctgcataaggatatctagtttccccagcaccatttttgaagagactctcctttgccaatgtgtgttcttggtacctttgttggaaatgagtttactgtagatgtatggaattgtttctgggttctctattctgtttcattggtctgtgtgtctgtttttatgccagtatcatgctgttttggttactgtagctctgtagtataatttgaagtcagataatgtgattcctctagttttgttcattttgctcaggatagctttatctattctggtttttttgtggttccatatgcattttaggattatttttattatttctgtgaagaatgtcattagtgttttgatagggattgcattgaatctgtagattactttgggtagtatggatatttcaacaaaactgattcttccaatccatgaacgtggactatcttttccattttttgtgtccttcaattttttgcatcagtgttttttgtttttggtttttgagatggagtttcactcttgttgcccaggctagaatgcaagggtgtgatcttggctcaccgcaacctccgcctcccaggttcaagctattcttctgcctcagcctcccaagtagctgggattacaggcatgtgccactgtgcctggctaattttctatttttattagagatggggtttctctatgttggccaggctagtcttgaactcctgacctcaggtgatccacctgcctcggcctcccaaagtgctgggattacaggcatgagccaccacgcccagccacatcactgttttatagtttttattggagaggtctttcacttcttcagttaggtttattcctcagtattttattttatttgtagctattgtaaatgggattcgtttcttgatttctttttcagattatttgctgttagcactgatttttgcatgttgattttgtatcctgcaactttactgaatttgttcttcagttctaatggttttttggtggagtctttaggtttttccaaatatcagaccacatgatctgcaaacaaggataatttgacttcttcttttccagttttaatgccctttctttctttctcctgtctgattgctctagttaggatctgcagtactgtgttgcataactgtggtaaaattagtcatccttgtcttattccagatcttagagaaaaggctttcagttttcccccattcagtatgttactagctgtgagtttgtcatatatggcttttattatattgaggtctgttccttgtatacttagttttttgagagtttttatcatgaagggatgttgaatttatcaaatgctttttcagtatcaattgaatgatactggcttttgtcctttattctgttgatatgacgtattacattgattgatttgtgtatgttaaatcatccttgcatacctggaatacattccacttgctcataaagaatgatcttttttaatgtattgttgaatgtggtttgctagtatttccttgacgatttttgcatcggtgttcatcagggatataggcctgtagttttcttttttatgatgtgtctttgcctggtttttgtatcaggatattcctggctttgtaaaatgagtttggaagtattccctcctcctctatttttcagaacagtttgaataggactgacatatgttgttctttaaaagtttaattgtggtaaattatacattacataaattttactgttttaaccacttttaagtgtatactcggtggcattagatacattcacatttttgtgcaacccaaaactctgtgcccattaatcggtaactccccattcctccctacctctggcccctggtaaccaccattctactttttgtttctatgaatttgaccactctaggtacctcatttaagcagaatcatgtaatgtttgtctttttgtttctggcttatttcacttataatatttttgaggttcggtgggcacagtggctcacgcctggatttccagcactttgggaggctgaagcaggtggatcacctgagtttcggagttcgaaaccagcctggccaacatggtgaaaccccatctctactaaaaataataaaagttagccgggcgtgatggcgggtgcctgtaatcccaactacttgggaggctgaggcaggagaatcgcttgaatccgggaagtggaggttgcagtgagctgagatcaggccactgcactccagcctgggcaacaagagtgaaattccatctccaaaaaaaaaaaataaaacaataataataataatatttttgaggttcatccaagttgtagtatgggtcagaatttcattccttttaaggatggataatactcattatatgtatgtaccacatcttggttatccatccctcagacaatggacacttgggttacttctaccttttggatattggcaaatatttcatttcctttgggtatatatttatttcctttgggtatttcttttgggtatatatccagaaatagaagcagtacacaggggcttcattttctctgtctctttgccaaccttgctctgtgtgtgtgtgtatgtgtgtgtgtaggtgtgtgataacagccatcctgattggtttcaggtggcatctcattgtggtttggatttgcattttcctaatgagtgctgatattgagcatcttttcatgtgtttgttgatcatttgtaattttctttgaagaattggccatttaagtcttttgcccattttttcccccacatagcttctcttatcagatatatgacttgcaatatttatttcatttcggggttgattgctttttcactctgattgtgccctttgatgcatagatgttttgaattttcatcagtctactttgtcagttctttctattctatctgtgctttggtgtcatatccatgaaagcactgtcaaatcctatgtcatgaacattatccccaatgtttgcttctaagaaatttttaggttttagttcttgagtgtagagtttaggtctttgattcattttgagttaatttttgtatatagtgcaaattaagggtccaattttattttaacaccccctgcccccagaactatttgctgaaaagatcaactgactctttgtcacctgctcaccccagtggacactagctgttccatccaattgctgtcctggggccttgtcatgctactcttccactttgaacccaagcccacaccgttcgttgctcccctctgggatactgaccccactataaacttctctggggctacaaccttcctaccctttgtgcctcatgaccaccccctcccttgtccccgccatgcccatgatgagtctcttctcgaggcagctccccttgcctccatctcaccctcagcctatgcaccacagccacactggacatgggtccctctgagcctgagtcccttcccattcccaccatctcctctggcaagaccttccttccaccaccttcatgctcctcccttgcccctgcagggcagcctctccccttggcccctattcccttagggggcttgtggccacccagtccttgcacctggcctacaagtttgccatcttcattcccccttcttctgttcatcagccccctcctctatcctcccaccctcacagttttctttgtatatgaaatcctcgttcttgtccctttgcccgtgtgcatttcctgccccaggaaggttgggacagcagacctgtgtgttaaacatcaatgtgaagttacttccaggaagaagtttcacctgtgatttcctcttccccagagccccacagtcttcgttataacctcacggtgctgtcctgggatggatctgtgcagtcagggtttcttgctgaggtacatctggatggtcagcccttcctgcgctatgacaggcagaaatgcagggcaaagccccagggacagtgggcagaagatgtcctgggaaataagacatgggacagagagaccagggacttgacagggaacggaaaggacctcaggatgaccctggctcatatcaaggaccagaaagaaggtgagagtcggcaggggcaagagtgactggagaggccttttccagaaaagttaggggcagagagcagggacctgtctcttcccactggatctggctcaggctgggggtgaggaatgggggtcagtggaactcagcagggaggtgagccggcactcagcccacacagggaggcatggaggagggccagggaggcataccccctgggctgagttcctcacttgggtggaaaggtgatgggttcgggaatggagaagtcactgctgggtgggggcaggcttgcattccctccaggagattagggtctgtgagatccatgaagacaacagcaccaggagctcccagcatttctactacgatggggagctcttcctctcccaaaacctggagactgaggaatggacagtgccccagtcctccagagctcagaccttggccatgaacgtcaggaatttcttgaaggaagatgccatgaagaccaagacacactatcacgctatgcatgcagactgcctgcaggaactacggcgatatctagaatccggcgtagtcctgaggagaacaggtaccgacgctggccaggggctctcctctccctccaattctgctagagttgcctcacctcccagatgtgtccagggaaaccctccctgtgctatggatgaaggcatttcctgttggcacatcgtgtcctgattttcctctattgttagagccactggataaagacagagggtcagggactggaccatccagtgttgtaatcagggcaagtagaggaccctccgacagaatcctgagcctgtggtgggtgtcaggcaggagaggaagccttcagggccagggctgccccctctgcctcccagcctgcccatcctggagagttccctcctggccccacaacccaggagtccacccctgacatccccctcctcagcatcaatgtggggatcccagagcctgaggccacagtcccaaggcccatcctcctgccagcctggaagaactgggccccagagtgaggacagacttgcaggtcaggggtcccggagggcttcagccagagtgagaacagtgaagagaaacagccctgttcctctcccctccttagaggggagcagggcttcactggctctgccctttcttctccagtgccccccatggtgaatgtcacccgcagcgaggcctcagagggcaacatcaccgtgacatgcagggcttccagcttctatccccggaatatcatactgacctggcgtcaggatggggtatctttgagccacgacacccagcagtggggggatgtcctgcctgatgggaatggaacctaccagacctgggtggccaccaggatttgccgaggagaggagcagaggttcacctgctacatggaacacagcgggaatcacagcactcaccctgtgccctctggtgagcctagggtgaccctggagagggtcaggccagggtagggacagcagggatggctgtggctctctgcccagtgtataacaagtccctttttttcagggaaagtgctggtgcttcagagtcattggcagacattccatgtttctgctgttgctgctggctgctgctatttttgttattattattttctatgtccgttgttgtaagaagaaaacatcagctgcagagggtccaggtgagaaaagcgggcagtttctggagatggtaaggcccctgtctgggcagtagggtcccctcattgctcctgcaaagataggcatgttggtgacaaggcttccgtaacaggggatgaaagttggggaatttgggaagggaatgggggcagcatctccatctacacccataagtgctgcccaagcaagggtcaaacgcccagctgtggcatcctcctgctgcaggtgaggagtgggcagcagggagggctgcggcgcctgctctgtccccatcccggtctctgtgtctcttgaactcactagggcgcatccaggtggggtgagctgggaatcacgtgctgaatgctaagggcctggatgatcacggcctcagagggagcaaatagtaaaggcagctgtgatctggggagggccagaaactggagaggaatctgaggagaggcggtgcccctattcccttcctctctgcatccccctcccctgtttctccagccatcggggcggacaccgagaaaaagacctatgaggcccagcctgggggccctgcctgtgtagccctttggagaccccttgtaacagggagggtcctgagcacacatggccatctctgtccactttgcagctccccatgcacctcctccaggagctttcttggggttgtcgtgtcctctgcaccattcgaggccctactctttccaggttcccacggcctggcctccctgagtttcttgcagatgacatggatgagtagataagcagatgtccctgggccatttgaggagtggggcccagcccctcatcagggcagctgtggtccctgttttcatcctacctccgagtgttttcttctccagtccctgagggacacagtcctcagggcccatgtttttggggatttaatctgtgctctgtggcctcaccttgccctccctgagccaatttccctttctaaaggtggtcactgcctggtaagtttggagtaagggacggtcagaatcatttcccctacagtcaggttgtttgatgggggatgaaaagagacagcaggaagttttgtgtttctgcaaagacagaagcagttcaggcgacagtaagaggctggggtgtccaggaggatgtgtctggcagtagggtcgctggtttctcatccttgaacctaattgcactgtcaatcggcccctcaggcctgagcagatgggaaggtttgtcccctgccctgcagcaagagggccctgtccaggaggcacccacaacaggggcagtgcaggtctgtggtcactcctgctctcacctgtggcgtctcccgtagagggattgtcagttctggttccctgtgggcaggaatggtttcctcataggtcactggagttttggccaggaaaagagtatgaagttcatgtgccagtttctcaaaattcctgctttcaatgttgatgtccagtaaagatattcgtaatttcagctctataatcttaataggatttcctctaatattgtgaagcatattatatgaaacaggaacacaaatttctcaaaattcctgcgatgtccaataaagattttcataatttcagctctgcaatcttaataggatttcctaatactgtaaagcatattaaatgaaacaggaactcaaatttggagccccctctccaggaggttctgtgtggagatggtggctgtggcagtggcagttcccaggtgcagagggtgggcagaggcagcctcaggctaaggggtctcccctactccacatggagaaaatcccttgtaggttgcaagggcagtggccgggtggaatccctgctagggacagagcaggaaggcctcgcagcctcaccaagcagcagccctggggtggagctgcgtttccagggttaagcggaccaggcaggagtagcggttactcaagagcaggtcacaggcttgggttgtgagggtcaggagaggccaggcctcctcgagcaaggtgggggtcccagggtcaggtcaggtgcagatcctgtggcagccacgtctttccatgctgggcctgctgggccccccaggcttcctgatggggtccccagttaggagctgcctgctcagggctgggaggggaggagcactgagctgcagatagagggcagagcccacagtgggcagggcctgccctggtgtgtaggtgcctctgcaggagaggagggcctggggactgagagcaagggtcagggcctctctttggggaggcctctcactgtaacaggactggtcaggcctgagaggagggcactgggttccctcttgggtcttgtcctttagtcttggggccctttccctccctgcacgatgagtggtgggcacagggcacgggctgatgttgatggagtgatgggagggaactggcaggggctgggaaaagcaaggagggaggaagaaaaaagtgggggcctcatcttccctcagagaaagggcaaatctggttttggagcaactgaagagtgaaaagtccccagggaataaacacaacactgcacccagtggagcatttacccatttccctcttttctccagagctcgtgagcctgcaggtcctggatcaacacccagttgggacgagtgaccacagggatgccacacagctcggatttcagcctctgatgtcagctcttgggtccactggctccactgagggcacctagactctacagccaggcggctggaattgaattccctgcctggatctcacaagcactttccctcttggtgcctcagtttcctgacctatgaaacagagaaaataaaagcacttatttattgttgttggaggctgcaaaatgttagtagatatgaggcatttgcagctgtgccatattaattggtgtcattgtttttgttgttttcgtattattattttttttttttaagacagagtctcaggccaggcacggtggctcacgcctgtaatcccaacactttgggaggccgaggcgggcggatcacaaggtcaagagatcgagaccatcctgatcaacatggtgaaaccctgtctctactaaaaatacaaaaaattagctgggcctggtggcgtgtgcctgtagtcccagctactcaggagctgaggcaggaaaatcacttgaacctgggaggtggaggttgcagtgagctgagatcacaccactgcactccagcctggcgacagagcgagactctgtctcaaaaaaaaaaaaaaaaaaagacagagtctcactctgtcacccaggctgcagttcagtgacatgatctcagctcgttgcagcctccgcctcccgggttcaagcacttctcttgcctcagcctcccgagtagctggggttacagacatgcaccaccatacccggctaatttttgcatttttcatagagacaggattttgccatgttggccaggctggtctcaaactcctgacctcaggtgatctgcctgcctcagcctcccaaagtgctgggattacaagcatgagccaccatacccggcctattttattacattttaatttattttattttattatatcatccaccatgtctggcctattttattatattttaagatattttaatatattacgtgtgttgtaattggattatcatcggtgagctttgtgagtgagtgtcttggagatgactcctcctgaccagcccaggaccagctttcttgtcaccttgaggtcccctcgccccatcacactcttacgcattactctatgtctactgttatgggtgtgtaattttataccatagatgtttactctttaaacagacacttctagtctgttttatttcatgtgtctgggagcggataaagtgtgaggttcagggagaaagagaggtctgtctcaatgccttggcacggcatgaagacaatctcccctccttgtcccctttccctgctagctcctgatgactgacagattcacagcagaacagaaaggactgggaagggatggaggtgggacatctggcactgaccttcaggggctgaccctgtgggggaacatctgccctgaagagttggagccttcatgtgatgacacagagctgaagtgtgatattcgggaggggatagagagtgcttggaggttttctgattttgaagaatcccagtcagtcaggttctggcgtaaagtgactgctggggaggtgtggactgaatgaatgaagaataaatgaaccaggaaagtggacatgcaagaggtgggttattcctcaccctatttcttgatgcctcctgactgctggtgttggggcacacagatgggtgatgcacttcttggtcaaggcaacctcagccccacccacgtaaggtggtcatggcagagagtgtaagggtgacacctgtgaaaaagacccaaggcagggatgggagcccttcttgcagcaggagtggatgcaggacctgcctggaagcaagagaaggacgagggaccctggctgggccctgtttcctcccactgcctggttcacaaagcaaccagtaagggagctggagtagggaattcactcatgtgctacttactgatccagagatgtgttcgttgacattttcttttatgttttcaggttgatgtcatttacacattcatgcatttatgttgtgtatttattagtcttgtttattttagttagcaagtgtcacttgttgaattctgttctcattaggtataaattttcatattcattgaagtttttataatcaaaatttaattgtccatgattttaaaagtcaaatatttgcataggatttctctagagaaatgagtcctctctgcatcttctcaatttctgccttcctagaggcaaccattttcaacatttttagctaagtctttcaacttttacttccatatgtctaaatacaattccttcattaatactgcttgatttttccgttgcagtcattatctgttgcacagcacagtggtgaatgcaatagttaattgtacctgttccctttcactcttcccattctttcatcttcccgatgtatttctgtagtaattatgtttggttcagtcgttccttgtttccttttccatgactaattttctcatatgtcagcttgaccacttttcacttcctgaacatttgttcttcctgtagttaatacttgcctttgtttttgtttattttataaatagcactcattaacgttgatatttcttctatttgtattactcctttttttgggatggagtctcactctgttgtccaggctggagtgcagtggtgcgatcttggctcaccacaacctccgcctcccaggttcaagcaattctcctgcctcagcttcccgagtagctgggattacaggcactcaccaccatgcccagctaatttttgtatttttagtagagacggcgtttcaccatgttgtccacaatgatgtcgatctcttgacctcgtgatccacccacctcagcctctgaaagtgctgggattacaggcgtgagacatcgcgcctggccttttttttttttttttgagatggagtctcgctcttgttgcccaggctggaatgcaatggcactatcttggctcaccacaacctccacctcccaggttcaagggattctcctgcctcagcctcccgaatagctgggattacaggcatgcaccaccacacccggctaattttgtatttttagtagagacagtttctccgtattggtcaggctggtctcgaactcctgacctcaggtgattcacccgcctcggcttcccaaagtgctgggattacagaggtaagccactgcacccagccgtattactcttttaagaaattacagactttggatattccactttaccttcttggaaatgtccctcctgggcccttctcgctgctcccatctggactggaggcttctccctgtggagcagagtcactgtcctaggatctccctccaccgccatctggggcagtgctttacatgcagtggagccacctggggtccagccaaaatgcagactgattcaagatgtcaaggctgaggcatatgagcctttctgtctagtttcatgagatgctgattctcctggttcgtgtgtgtgtgtgtgtagagagagagagagagagaaagggaattttgctctgtcagccaggctggagtgcagtggtgccatcatggcttactacaggctcaacctcataggctcaagtgaccctcctacctcatcttcctaggtagtcaggaccacaggccacatcctaatatatttttaattaactgatgcagtttctttctaaattagtaagagggctgagcattttttcattgtggcaaaaaatacacataaaatttactatcataactatttttaagaatacagtaccattggccaggtgtggtggctcatgcctgtaatcccagcaatttgggaggctaaggcaggaggatcactggaggcctacagttcaagtcaggcttggggaaagtagtgagaccctgtctccagccaaaaaaaaaaaattaaattaaaatatactgtactataatagtgttaattgtaagcacagtgtagtgcaaccgatctttagaatatttcaccttgaaagctgaaactctgtgcccctttcacaaaaatccttattacctggaagttttacctggcagccaccattctaccttcacattcatcaagtttgactgttttagacacctcatgtaaatggaattatgcagtacttggagtttttttttttttttgattggcatatttcacttagcaatgactttaaggttcatatacgttgtagcatatagcaagattttcttcttttaaatgttgaataatattccattgtctgtatataatcatattttcttgatctattcatctgttggtaaacatataggttgcttccatatcttgcctgttgtgaataacaccattatgaatatggatatgcaatctttcttttcacttttgtatcccccctcattttggtgcaactaatcttctagtagcttttcctgaaagcacgtgcttaaagtacatttgtgtgtttcaacatatctactatcattttgcctctctccaggaagaggaaagaaatgtattaaggtgctctttggcacagcatttaatggtaaagaaagaaacagtataactggccagtgctgggtttcagcatcctgcaatttcagaactactgtgaatacaaaagaaagaaaggtcctgcccaggatgggagtcactcctatatatggtggccctgggacagcagacctttcctgtcacacctcttccatgagggcccttacttcagtgactgtggtgctttccttctctctatggtctatctatctatctatccagttggttgggtttctctggagaaccctaatataccaatggacagtaagcaaataaaacctagtattaccactaattgccattgagaaaaatatgcctaggccagaagattggtgatggtgggaatagcagggacatagtttagacaaggtcattgagcaagacgtttctgagaacttgaccactggttatctgagaagagacctgaatcgtgtgaggagtgagtcatgtgaatccctggggagcaggtacatgtgggagtcagagcatgggtaggtggcagaaatagggcagagcactgacaagaggctggtgtgagtggagacaagtgagctgggctgagaggagtgggatgagcccagagttgacagaggggccctgtgttgaggggcttctaggaaatggtgagacattggggtttcattgcactaagaggggaagaagctagagtggctttgggatgtggtggtgatgatgtgctctaattcccgtttgaaaggtttactctacctgttgtgtgggtgatggacagcggcgtgaatgtctcttcatgtccattacccatttttgaatggcgttgtttttttaatggatgagttgtagttttttatgtattttgaatattaattcttcatcagatgtatgattggcaaatagctcctcccattctgtgcattttctttccactcttttaataatgtcacttgttgcaaaaaagtttttaaatctgataaagtctaatttatcatttttctttaattgctcatgctttgggtcatccagccaagaaactactaccaaatccaatgttcacaagactttcctcaatgttttcttctaagggttttacaggtttgactcttaagcttcgttgtttgatacattctgagttaattgttgagtatggtgtagggaaggctatgaattgtgtccaacatcattcttttgcatgcggatatccagtttctcagcaccacttgttgcagcaccatctgtggaagtgaggctgacacatttgcaaaatgcattgagcactagtacaccatgcatttatttacttttctttactccacagttgttttgaggaggcttccagtgacaaacacaacagaaatgaaaatacatgaattcttataaaatcaatatcaagtagaattataaactttaaaatgttaagagtgaggcaaggctagatcattactagacaagctgaaacatagactgaaatggagggtttacggttttccttgctacaaattttgttggcccacaatctgtcatgcttactgcataagggagccagccacagggtgggttgatagctcacataaccagtccctggtttcctgcttcagaaacaagttcagattctctccacttacagtaaaaaagtgaattgcaggatgttcaaagtgaagttgacatctacaaagtcaacaaataagtagtaagtgtagacctcagaaatttaacaagattctactttttcccccaaaaaaatgtcctcacaatttcctgctgaaaggagagggttcattcaggggaccacatgatgccgttcttctgctgcagttctaaattaagttgtccttccctctaactacaggtctcacaaacccttgcagccagcttcaatgattttagcttgactaaggttttgggtttttgatattgtttgtatttgagctgcagcctggggcttagaaatgtgacttgggtattttgccaaaatggtatgtttttctatagaatttgacgttgtggagaccctgcttttctgccaggtccccagaggggatacagtgctttgtacctctttttagtacttcattagcagtgatagaagatttggagtgagggcctccctcaatctctaccctctgcctagtgcagaggatcatggactgttgcagttatggcaacaaaaaatttctccagacatagctcctgtcctctggtgggaaaatctcccctggatgagaacactagtttgagaggtagagacactcaggagctgggcttggacaggggaagggaagaggagacagacacaaaacggagtggggctgggaaacaggcaaagggagttcaggcctggagggacctggcctgatgaggcacatgaggaatggggagagtggcaggatctcctattgccagaaaatcgtacttgtacccactgcattcccagccctggtgtatgcatctctgggaaatcagaatgaatttggctattatggtgtcagaaagagccctgaagagcctcgtgtgcctgtcaatgtaatgaaagtgcaggtgacagcccctcctggaaatattgttgccaaatgtttaacccagatctgcctcggtctttaggaaacacagcagagagaagagcaaagtaaaaggcatcaggggaaataatatgataaattcggtgtggagagcatgctaaagttatttggcctgcaataagtaatgctgttctaaaagaaaaaaggattagtggattgttgtagattacaggtaactaaaggacacataatcaaaggcaatgagtggatattttatggaaccaagttataaaaatgtacaaagaatagattgaagaagtgaagatacttgaatatgaaaggactttagataatatggaattattgtttattttctttggtgtgataatgtaggtttttactcttaggagatgcacgatgaggtgtttagtggtgaaatatcatgggtctagcaagttactttagaatggttcagtcaaaaatcttagtctcttcattctgtctctcttcatacatacacacacacatacactcacatatacacactatacaaacacatacagctgaagcagcataaaacctagtttctagtagagggatgcaaaaagggaggagaattggtaagttagagttttttggcaaaggactgacaatgcgccacatggataggacttctattccgctagctggtgctgttgaccttgaaactccatgtgcactccagaccaagggcagagagagatgctcactgtggcgggtaggggggatgtgttcctagaaaatcacaatgacattcccctgagctatatccctggttactacagcatttcctgatcttgcctaacaggattacttccctgaactgtaaaattcctgcagcattgtatacagagaaagaataggagacatggcaatcatggacaagaaaggaggaaatcgtgataggaaagttagagatcctgttgccaacacccagtcaggcattcggaggctggggtcagtctagaagcctttcataatgccacgtggtagctccatccagaaatcctcagttgctccctgacttcttccagccccaggtgatggctagatcctccatgaaaggaaactggttcaaacacggccaatatgcccagcaacccatgggtaatgggggattctccatgttctccccaggaagcctgtctcccgtcttgtaatgctgggagccacactaatcatttttaaatggctgaaggggacccagtatttggtttgatttgattctaaaaatggaggccaagagcctcaaaataaaaaaacagagtggaggtctgctcctgtactcaccattctgatgaatgtaccttgggatcctgaatgagcaccaaaaataaagcagcacctttgtctggggtgatacctgagatgcattgcctcatgccaagaaaattaaggacacagacacacacaaggagtgagtttaggagtagaggtttaataggcaaaagaaaagaaagagaaagaagaatagctctctctcctgtgagagaaggggcacgcaagtgggaattccagcccatggcagagtgcactggattttatacacaggctgaaagaggtgtctgatttgcacagggcccacagattggttggaccaggtgtgatgtttacatagtgcatggggaagctgaccaccccaccctaatcttcttatgcaaataggctttccacttggctgacaccatgttgtctgctccctgctgcacacgtggttggaaaggaaaagtgaagatggagccgccatttgaacatgcctagtcccaggtagccttttcctattggcacaactgctggcattcactcaggcaagcttccagcttgcttgtctatgtctgcagctcaattttacaggctgctctttgttagaaagaaaatgatttgggggctgcttttcattaaaaggaaaaccttaccaaggacttctttactctcactatctgcctaaataatttctttttaactcctctatcagttacaaaatcagttttaaagcacatactgttctgtgatattgggatatctggacattttgttgtcataggagtttatccttgcaggtattaccaaactgcttccttagctatcaacatcctaggaccatgggtcatgacaagcaaggaatgtaccctgctagtttaaagataaacttgatttgcggggagggggtggtttttagttacatgggtaagttcttttgtggtggtttctgagattttggtgcatccatcatctgaggagtgtacatgtacccaatgtgtagtcttttctcccgcaccatcctatgaccctaccctctgagtccccaacgttcattatatcattcttttgcctttgcatgcccatataagtgagaacacatgacatttagatttcaattcctgaattacttctcttagaataatggcctccaacgtcgttcaggctgctgcaattgccgttatttcacttctttttgtggctgagtagcattctacggtatatatatatatacaccacattttcttttttttaattacactttttattttgaggtaatcatagatccacatgtaactgtaagaaatagtaaagagggcaggcatggtggctcacgcctgtaatcccagcactttgggaggtggagagagcaggatcacttgagaccaggagctcaagaccaacctgggcaacacagcaagaccctgtgtcttaccaataaaataataataataataaagagaaatgtcatacattctttacccattattcttcaatgacatgttacaaactacagcataatatcacaagggacactgacattgatatggtcaagacacagaacagttctaccaccacaaggagccctcatgttacccttttataatcacactgacctttccccgcttccatgcctaacccctggcaaccactaacatattctctacttctattaaacttgtcatttcaagaaagtgatatgaatggaatcatgcagtatgtgttcttttgatattggctttttttttcactcagcgtgattccctaaagattcaaggattcatttacattcttggatgtatctatcaatagattgttggtttttttgtttttttgttgttgttttttttaattatactttaggctctagggtacatgtgcacaacgtgcaggtttgttacatatgtatacatgtgccatgttggtgttctgcacccattaactcttcatttacattaggtatttctcctaatgctttccctcccccctcttccctcccccaaccccacgacaggccccagtgtgtgatgttctccaccccgtgtccaggtgttctcattgttcaattcccacctatgagtgagaatatgcggcgttcagttttctgtccttgtgatagtttgctcagaatgatggtttccagcttcatccatgtccctacaaaggacataaactcatcctttttatggctgcacagtattccacgatatacaccacattttcattttccactcattgattgacggacatttgggctggttccatatttttgcaactgtgaattgtgctgctataaacatgtgtgtgcaagtatctttttcatataatgacttcttttcctctggtacatacccagtagtaggattgctggataaaattgtaaatctacttttagttccctaaggaatctccatactgttttctatagtgattgtactagtttacattcctgccagctgtgtaaaagtgttccctttttaccacatccacaccaacacctattatttttttatttttcaattatggccactattgcagaagtaaggtggtattgcattgtggttttcactggcatttccctgataattagggatgctgagcatttttttatgtttgctggccatttgtatatcctcttttgagaattttctattcctgtacttagccttctttttgatgggattattcattttcctcttgctgatttgtttgagttccttgtagattctggacatcagtcctttgtcaaatgcatagtttgtgtatatgttctccctctctatgggtcgtctgttaactctgttgattatttcttttgctatgcggaggcttttttgctgaattaggtcccatgaatttatttttgtttttgttgcatttgcttttgggttcttgctcatgaagtcattgcctaaaccaatgtctagaagggttttgttcagtgttatcttctagaatttttatggtttcaggtcttagatttaagtctttgatccatcttgagttaatttttgtatacggtgagacataggatccagtttcattcttctacatgtgagttgccaattatcccagcaacatttgttgaatagggtgtcatttccccactttatgttttcatttcctttgtcagagatcagttgactgtaagtatttggttttatttctgggttctctattctgtttcattggtctacatgagtctttagggttttctagctgtacaatcatatcatcagcaaacagcaacagtttgactttctctttgccaattcggatgccctttatttctttctcttgtctgattgctctggctagaactttcaatacaatgttgaagacaagtggtgaaagtggacatccttaccttgtttcagttatcgggggaatgatttctaatttccctcattcaatataatgttgcctgtaggtttgtcataaatggcttttactaccttcaggtatgttccttgtatgccaactttgttgaagcttttaatcataaagcaatgctggattttgtaaaatgtttgtcaaatgttttttgtgcatggttaatactaagtgtcaacttgatttggattgaaggatacaaagtattgatcctcggtgtgtctatgagggtgttgccaaaagagattaacatttgagacagtgggctggggaaggcagatccacccttaatctggtgggcacagtctaatcagctgccatttaacataaagcaaacagaaaaacaagaaaaggagagacactggcctagcctcccagcctacatctttctcccatgctggatgcttcctgcccttgaacattggactccaagttcttcccttttgggactcaggctggctctccttgctcctcagcttgcagacagcctattatgtgaccctgtgattgtgtaagttagtactcaataagcatatatatatattatatattatatatgttttatatatattatatattatatatgttttatatataatatatattataatatatattattctattattatattattctgttaatattaaatactaacataatatatattatatataaaataatatatatataacgtactaacttacattttgtgtgtgtgtatatatatattctatatatatattctatatatatattctatatatgtattctatatatattctatatatatattctatatctattctatatattctatatatctattctatatattctatatatctattctatatatgttctatatattctatatatatattctatatatattctatatatattctatatatatattctatatatattctatatatatattctatatatattctatatatattctatatatattctatatatatattctatatatattctatatatatattctatatatattctatatatatattctatatatatattctatatatattctatatatatattctatatatataatctatatatatattctatatatattctatatatatattctatatatattctatatattctatatatattctatatattctatatatattctatatatattctatatattctatatatattctatatatattctatatatattctatatattctatatatattctatatatattctatatattatatatatataatatatatattatatatatattatatatatattatatatattctatatatattctatatattctatatatattctatatattctatatatattctatatattctatatatattctatctatatattctatatatattatatatattctatatatatattctatatatattatatatattctatatatattatatatattctatatatattctatatatatattctatatatattctacatatatattctatatatattctacatatatattctatatatattctacatatatattctatatatattctacatatatattctatatatattctatatatattctatatatatattctatatatattctatatatatattctatatatattctatatatatattctatatatattctatatatattctatatatatattctatatatatattctatatatattctatatatcctatatatattctatatattctatatatatatcctatatatattctatatattctatatatatcctatatatatcctatatattctatatatatatcctatatatatatcctatatatcctatatatatcctatatatatcctatatatcctatatatatatcctacatatatatcctacatatatatatcctatatatatatcctatatatatcctatatatatatcctatatatatcctatatatattctatatatatatcctatatatatcctatatatattctatatatatctcctatatatattctatatatatctcctatatatattctatatatatctcctatatatatattctatatatatcctatgtatatatcctatatatatatatcctatgtatatatcctatatacatatatcctatatatatatcctatatatatatatcctatatatatatcctatatatatatcctatatatatcctatatgtatatcctatatgtatatcctatatgtatatcctatatgtatatcctatatgtatatcctatatatatattctatatgtatatcctatatatatattctatatatattctatatatatattctatatatatactatctatattctatatatatagtatatatattctatatgtatatattctatatatattctatatacatatattctatatatatattctatatatattctatatatatattctgtatatatatattctgtatatatatattctatatatatattctatatacatatatattctatatacatatatattctatatatattctatatacatatatattctatatatatattctatatacatatatattctatatatatattctatatacatatatattctatatatatatattctatatacatattctatatatatattctatatacatattctatatatatattctatatacatattctatatatatatattctatatacatattctatatatacatattctatatacatattctatatatatattctatatatatattctatatatatattctatatatatattctatatatatattctatatatatattctatatatatattctatatatatattctatatatatatattccatatgtatattctatatatatatattctatatgtatattctatatatatattctatatgtatattctatatgtatattctatatatatattctatatgtatattctatatatatattctatatgtatatattctatatatatatatatatattctatatatatatattctattagttctgtccctctagaaaacctgactagtacagattttggtaacaggagtggttctagaggaacagaatattaaggatggagttcttttgttagtttaggggtttctggagttggttgcttaatatgattagacccaaaaatgctaaggactctacttctaatagtgtggagaatgctgatagtccctggcatgaactgtttagagagtaacgcaaaataaatgcatttcacactattcactgctcctgagaggcaagtttagtgactctaacctaataattttgaccatatgtagagaaccaaggaacataatgaagctggttggttgctcctaagttcagtggacaaagtgataaaagaagataatgaactcagggattctgtctcccagcttcagaagcagatactgagcctcaaatctgctaagattgccccatgagtgacagtcttatctcctgtagagaaagagctgaaattgtggaaaaacagacaaaagctcctatcatgtgagtagctgacctgcgatgaaagatgcatacacagcctcaccaagtgtctactgttaaagtgagggcattgatcagaaaagaatgagaccctgcaacttggaatggggatatgtgggaggatcctaatgaagctggggacactaagtgtgtaaattatgatgaaactttttttgctagaagaatcagcttccccgtccctagtattggcaacatcccctccccagcccatgctgtcatcagcctttccacctttatctgagaagacaaaccctgcactgcctgaggcaacagtgatggcctgccctgaagcagttgccaggcaagataatgttgattctcctcaggagccacccctaacacctctgtttgcttctagacctatgactagactaaagtcccagcggtcccctagaggtgaggttgagagtgtgacccatgaggaggtgcactacactcaaaaagagctgtttcagttttctaatttatatcaatagaaatgtggagaacaggcatgggaatggatattacaggtatgggataatggtgaaaggaacatagagttggataaggctgaatttattgatttgggccattaagtaaggactctgcttttaatgttgcagctcggggagttaaagaaggttgtaatagtttattttcttggttagctgaaatatggattaaaaggtggcccactgtgagcaagctggaaatgtctgatctcccttggtttaatgtagaggaaggaattaaaaagcttagggagattgggatggtggaatggattagtcagtttagacctactcatcccaactgggaaggtctagaagatttacccttgaccagtgccttgtgaaataggtttgtgagggcagcacctgcatctttgaagagccctgtaattgctcttctctgcatgtcagagctaacagtgggaatcacagtactcaactataaaatttaaatacaatgggaataattggatcccgaggtgtcaggggccaagtggcagcattcaaccatcaaaggcaaggtgagtgtagctaccataatggacagcagaggcaaagtggcagtcataatagtccaactcatgcagagctctggcattggctaattaatcatggtgttcctaggaatgaaattgataggaagcctacttcattcctacttaatttatacaagcagaaaacttctatgtgcaatggacaaaagactaattttaatcataaaaacaaagaatcatggcccctcagtcaatttccagacttgagccagtttacagacccagaaccccttgaatgaaaaggaagctgggtctccttgaagaaggaccccactacattactgacaatttatgcagtgaatcttcttccatccttctgtgaggagacctccagccttttaccagggtaactgtgcactggggagaggaaaatgattagatatttcaggaatacaggacactggctctgagctgacattgattccagggaacccaaaacatcattgtggccctccagttaaagtaggagcttatggagttcaggtaattaatggagttttagctcaggtctgacttacaatgggtacaatgaatccccagactcatcctgtggtcatttccccacttaatgcattttcccaattaattttcccaattaatgcatcatttccccaatgcaatttccccaattaatgcataattggcataggaatagttagcagctggcagaacccccacactggcatgctgactggtagagtgagggatattatggtgggataggccaaatggaagccatcggagctgcctttacctggaaaaatagtaaatcaacaatgtcacatccctggaggtacagaggagattagtgccaccatgaagaacttaaaagacacaggggtggtgattcaaatcacatccccattcaactctcccaaatggcctgtgcagaagacagacagatcttggagaatgacagtggattattgtaagcttaaccaagtggtgacgactccaactgcagctgctgcaccagatgtggtttcattgcttgagcaaattaacacatctcctggtacctggtatgcagccattgacttggcaaatgcctttttctccattcctgtccataaggcccacaagaaacaatttgccttcacaatatgcgtttactgtcctgcctcaggggtatatcaacaatccagctttgtgtcataatctgattcaaagaaaccttgatcactttccgcttctgcaagatatcacactggtccattaccttaatgacattgtgctgattggatccggtgagcaaaaagtagcaaacacactggacttattgatgagacatttgcgtgccagaggataggaaataaatctgactaaaattcagggaccttctacctcagtaaaattctaggggtccaatggtgtgggacctgccaagatattccttctaaggtgaagaataagttgctgcatttggctcctcctacaaccaagaaagaggcacaatgcctagtgggccgatttggattttggaggcaacacattcctcatttgggtatgttactccggcccatttatcaagtgacctgaaaggctgccagttttgggtagggtacagaacaggagaaggctctgcaacatgtccaggctgctgtgcaagctgctctgccctttgggctatatgacccagcaaacccaatgatgtttgaggtgtcagtggtagatagggatgctgttggagcctttggcaggcccacatagttgaatcacagcagaggcctccaggattttggagcaaggccctgccatcttctgcagataactactctccttttgagagacagctcttagccttagcctgttactgggctttggtagaaactgaacatttgactatgggtcatcaagtcaccatgcaacctgaactgcctatcatgaactggatgctttgtgactaatctagccataaagtgggtcatgcacagcagcattccatcatcaaatggaagtggcatgtacatgatcgggctcaagcagatcccgaaggcacaagtaaggtacatgaggaagtggctcagatgcccagggtctccactcctgccaccctgctttctcttcctcagcctgcaccgatggcctcatgaggagttccctatgatcagttgacagaggaacagaagaatagggccttgttcacagattgttctgcacgatatggaggcaccacccaaaagtggacagctgcagcactacagcccctttctaggacatccctgaagggcagcagtgaaaggaaatcttcttagtgagcagttcacctggttgtgcagtttgcatggaatgagaaatagccagatgtgcgattatatactgattcataggctgtagccaatggtttggctggagggtcagggacttggaagaagcatgattggaaaattggtgacaaagaaatttggggaagaggtttgtggatggacctctctggtcaaaacccacaaagatatttgtatcccatgtgagtgcccaccaatgggtgatctaagcagaggaggattttaataatcaaataggatgacccgttctgtggacaccactcagtctgttttcccagccacttctgtcatcgcccaatgggccaatgaacaaagtggctatggcagtagggatggagggtatacataggcttagcaacatagactttcactcaccaaggctgacctggctatggccacttctgagtgcccaatttgccagcagcagagaccaacactgagctctcaatatgacacctttccttgggcgatcagccagctacctggtgacaggttgattattggacctcttccattatggaaagggcagaagtttgtcttcactggaatagacacttactccggatatgggtttgcctatcctgcatgcaatgcttctgccaagactaccatcatggagtcacagaatgccttgtccacccttatggtattccacacagcattgcctctaaccaaggcactcacttcatggctaaagaagtgcagcagtgggctcatgctcatggaattcactggtcttaccatgttctccatcctgaagcagctggattgatagaatggtgtaatgaccttttgaagtcacaataacaatgccaactaggtgacgatactttgcagggctggggcaaagttctccggaagactgtgtatgctctgaatcagcatccaatataggatagtgtttctcccatagccagaattctcgagtacaggaatcaaggattggaagtggcagcactcaccatcacccctagtgacccactagcaaaatttttgcttcctgctcccacaacattatgttctgctggcctagaggtcttagttccagagggaggaatgctgccaccaggagacacaacatcgatttcattaaactagaagttaagattgccacctggatactttgggctcctcctacatttaagtcaacaggctatgaagggagttacagtgttggctggcgtgattgacctggactatcaagatgaaatcagtctactactccacaacagaggtaaggaagagtatgcatggaatacaggcgatccattaggatgcctcttagtattaccatgccctgtgattaaggtcaatgggaaactacaacagcccgatccgggcaggactacaaatggcccagatccctcaggaatgtaggtttgggtcactccaccaggaaaaaaaaacacaacctgctgaggtgcttgctgaaggcaaagggaatacagaatgggtagtagaagaaggtagtcatcaataccagctatgcccacgtgaccacctgcagaaacagggactgcaatggtcatgaatatttcctccttcttttgctaaaagtcatgtttgtgcatgtatacacttggactaagaaaatacctttattttatttccttttcctttatcatgtgacataagatttattgacttcatgtcagcatttaagttttattaactttatgtaatagtacttggggattggtgcgtttctggttgtacgaaggatcattgtattatgttggtgtaattatgaccttattattgtctttgtttgaagattatgtatgatctcaggagatgagtatgggttcaagttgacaaggggtggacttgtgatggttaatactgagtgtcagcttgattaaattgaatgatacaaagtattgatcctgggtgtgtctatgagggtattgccaaaagagattaacatttgagacagtggaccagggaaggcagatccattcttaatctggtgggcacagtctaatcagctgccagcaaatataaagcaagaagaaaaacttgaaaaggagagagactggcctagcctcccagcctacatctttctcccatgctggatgcttcctgccctcgaacatcagattccaagttcttcagttttgagactcgaactggctctcctttctcctcagcttgcagacagcctattgtgtgaacttgtgattgtgtaaattaatacttaataaactcttatatatatatatacacacacacacgtatatgtgctattagttctgttcctctagagaaccgtgactaatacatgtatctatcgagataacaatattatttttgtttttcattctgtttatgtgatgtatcacatttattgacttgcgtatgttaaaccatccctgcatccctggtatgaaacccacttgatcatggtggattatctttttgatatgctgttggatggattaaccagtattttgttgagaatttttgcatctatgtttattagggatattggtgtgtagtttacttttttggttatgtcttttcctgcttttggcttcatagaatgatttagggaggatgccctctttaccttttgaaatagtttcagtaagattgagaccaattcttctttgaatgtctgatggaattcagctgtgaattcatctggtcctggactttttttggttggcaattttttttttattgctctttcaatcttgctacttgttattggtctgttcagtttctgttttttcctgatttaatctggagggttgtatatttccaggaatttatcaatatcaatctattctagattttctagtttgtgtgtgtaaaggtattcatggtagccttgaatttctgtggtatcagttgtaatatatcctgtttcatttctacttcagctcgtttgggtcttttcttctcttggttaatttcactaatggtctatcaattgcttatcttttcaaagaaccagctttttgtttcatttatcatttttcatgcttcaattttatttagttctgctcagatctttgttattttatttcttatgctgggtttgagtttggtttgttcttgtttctctagttccttgaggtttgaccttagattgtctttttgtgctctttcagacattttcatgtaggcatttaatgctatgaactttcgtcttagtacttcttttgctgtattccagggttttaataagttgtgtcactattatcattcagttcaaagaatttttaaatttccatcttgattttaatgttgactcaaagatcattgaagagcaagttatttaatttccatgtattcacacagttttgagggttcctttggagttaatttccagtttcagtccactgtggtctgagagagtacttgatataattttgattttcttaaatgtattgagacttactttgtgacctatcatatggtctaccttggagaatgttccatgtgataatgacaaaaatgtatattctgcagttgttgggtagaatgttctgtaaatatctgttaagtccatttgttctagggtatagtttaagtccattttgtctttgttgactttcttgatgacctgtctagtgctgtcagtgaagtattgaagtcccccactattattgtgttgccacctatctcatttattagatccagtaataattgttttataaatttggaacccctagtgttaggtgcatatatattaaggattgtgatactttcctgttagactaatccttttgtcattatatagtgttcctctttgtctttttttttttaaactgttgttgctttaaaggctgttttgtctgatataacaatagctactcctgctcacttttggcttccatttgcatgaaatatttccacccctttaccttcagtttatgtgagtccttatgtgttaggcattctcttgaagacagcagatactcgattggtggatttttacccattctgccaatctgtatcttttaagtggagcatttagattattgacattcaacattagcattgagatgtgaggtactattttattcatcatgcaggttgttgccttaataccttgttttttccatttcatagtgttgttgaagagtgatggctaaatgtatccagcataactcacctacacttagttttctagataattgagttgggtggccccattttaataatgacaaacatgaaattctaaatgcaatatcatcttggagagattatttgattttttcctataggaattgtctccaaactgctttctagacagcctcacaaagcatctagaatgtataaatttgactttcataatgcattaatgatatggtttggctgtgttcccacccaaatctcatcttgaattgtagttcccataattcccatgtgtcatgggagaaatgtagtgggagttaattgaatcatgggggcagatcccccatgctgttctcatgatagagtgactctcatgaaatctgatgcttttataagcatctgacatttcccctgattacactaattctctcttctgctgccatgtgacaaggtgccttctgccatgattataagtttcctaaggcctccccagcaatgcggaactgtaagtcaattaaacctctgttgtttataaattacccagcctcaggtatttcttcatagcagtgtgagaatggactaatacagtaaattagtaccaggagtggggtgctactataaagatacccaggaatgtggaagtgactttggaactgggtaacaagcagaggttgggacaggttagagggctcagaagaagacatgaacatgtgggaaagtttggaacttcctagagactcagagggctccgaagacaggaagatatgggaaagcttgaaacttcctagagacttgttgaatggttttgaccaaaatgctgatagtaatatggacaatgaagtccaggctgaggtggcctcagatggagatgagaaacttgttgggagctggaataaaggtgattcttgctacgctttagcaatgagactggcagcattttgcccctgccctagagatatgtggaactttgaacttgagagagatgatttagtgtatctgccagaagaaatttctaagcagcaaagtgttcaagaggaagcagagcataaaagtttgaaaaattcgcatcctgatgatgcaatagaaaataaaaacccattttctggagagaaattcaagcccactgcagaaatttgcatcagtaagggggagctcaatgtcaatcaccatgacaatggggaaaatatctccagggaatgtcagagactttcacagcaacctctcccatcacaagcccagaggtcatccttaagtgaaaaaatcaaccacaggagatgacatgataataggcttattacagtagaggaaggtacaaagtgtttctcatcattggtgtgtttgttaaaatggggaggggttactgagtgagtgggcagtgggtggtggtggtgacaaccacattctctcactgtggcccaacacttttgaagcagtttcccatttctccattagatgtgtcttctccacatgcagaaaatgtagtctcatagcttccctattgggtgctggactgttggcatttcattattttttttaaatcaaagacatggatatcttttttcttagttgatttctaggacttcaaggttatttgggggaagaagttgcttgaggaggctcctgggtggaccatggagtccctcctagggatttatttggtgctcctggtgtgggtgactatctccctgagtcccaaaagacagcacattctgccgggtacccagaggtggggacagatgctaacagctccatcttataagtgcaacatgaaatttaaggtcagggaatctcttaacttttcttgaaggacctcatatttagcttcttgactcaaaatcatttgtggatttgaacaggtttcctctgcaatgtactctctggaggggaatacattgaaaatacagttcattttcagatactcaatgggattgaaaagttgaattgtgtgctttcttgcagtgagcacagaggaatttgctgtcccatgccactgggacatttttaggagcaccattctcttccagagggcttgagtaaggtcagtgaggaattaacatgtagcatattggcaactccagggttgagcagggagacacacatgtttttctgatgtgtgaagttctgagggcattttccaaagtacttgttcactgagcaggtgtttccactacttgcattaagtcaggggatatggaagccacttttccagcaatcaaactcaatgagaagatgaacaagaagtgttctgaaagtaagcagaaaaggccctttccatgaattttcctaatttttagatttctcttaaacaacatgcctgaagttacaaccacatccttctctagcagcttctaaatgagaaaatcatcaaaagggtatttagtactcaagtggtggacacaggataaatgctgaaaatcagtgctcgattcgaagatagtgatgttccaggatgttggagtctctcaggtgtcagtagggaggcgggccgggaacttctcccagtaaccagaaagaagagcctcagggagatgaggatgtctcacagccagggacgggacagtaaagggccccatgtgagtgcatcacagggatctgttcctgtttagactccaatgctcagtacccagtgcagaacatggcaagacttcagcaaatacatcagtcagctggatgaaggaggcaggtgtgagccagcaaaaaaaagcttgtgattttattggagcatgaatttaaaagtgttgatgtggctgggcgcggtggctcatgcctgtaatcccagcactttgggaggccgaggtgggtggatcacgaggtcaggagtacgagaccagcttgaccaacatggtaaaaccccatctctactaaaaatacaaaaattagccgggcatggtggcagacgcctgtaatcccagctacttgggaagctgaggcagagaattgcttgaacccaggaggcggagattgcagtgagctgagatcatgccactgcactccagcctgggtgacagagcgagactccatctcaaaaaaaaaaaagtgttgatgtacctaccttgcaaggaggtagataggtagacagaagcatggatagatggatggatattctttttctgtgtttttctatttctgttctttctctgtgttttgtctctttctcttgctctgtctgtatcttccactgttccttcataatcatgtcttagccatcatcagtgacatcttttatctggtcttataagatcttgtctgtctgttgtattagtagccacaggacagaaaaaggaaaggagtcgtgaaaaacaagataaggaaaaagatgctcctgacatggggcatcgggaggatgtgtggccctgaggctcccgggagacaggggctgcgcctcactgcagagtccatcctgctgaacacagaggggaaaagcgccctgacagccccgtccgtgctgctcagaaaagacggctccgtctccagatccttctctctatgtccttcagtcttggctctctaggtacaatttactgctatgaaaagggatttgagaattcccagaggagcctttcagcctctttgcatggctctttctggcctttcaaaagcgccagagacatcagaaatgaaatcgtacacacttattcggagttttccacaatcattgaaatttctgtgagtgccaaagttaagtttttggcaaccccgtcaaagccgggtgtgcccaggacagtcaactcaggcgctggactctcattctggttggattttatgacagccgtattcgccataagaattctagagccagaccttgttacttcacaattgcctcacgttgcaggacaagcaaatctagcctgagtcctgtggattccagggctgctcaggagacgcctccatcctggcgtggatgacctcaggatcagccccgtctgccccactcagcccgcagcctggtccccgaaagcgctcagtcagaatccgagagcagtgtggcggcgcccccgtgtggccacaggactgaagacagaggaccccgctcccctttctccccagccaggacgtcccaggctctccccctgttccccgcacctggacgggactctgcacagaagagagtctcccggtctcgtgtcaggctctgagttcatccagcttcccaaaatccatgttgatatgaacgttttctcccacaactgattgactggacttttgtctcagggcagagggaggcctccagaccaaaacagcaggatcaggtctggagctgactcaaccccaaacccttgctaatgcacgacccagtcccccagcctccaggatgggaccttggcctcctgtcccctcccttgttcctgccactgctcctgcaggtggaggctgctcatcccaggaatcagtctgtgagctccaaccttggggcctcggtccaggaaggagggaggctccagagagcagaagggagatgaaatggatcataagagaagaaggaatcataccaaacactggaactgtaggtcaattaaacctttttctttataagggggggggaggaagaggaggaggaaaaaggaggagggtgaaaggagtcagggaggagagaaaagtgggaagtgtttctttagaaggggtgtgtgtgtgtgtgtgtgtgtaggtgtgtgtaaagcaggagggagttcctaggatcctgaagaaaagagagtgaaggacaggggctaaggggcccagccctggtaggttgagggccccactttctgtgctcgggccttactgtcctagcagagtccagccccgggaagcctggggtcacagcactcggcttgctggatggctgcctcttcattgtctttgacagcaggagctaccttgccaggcccagtggccacagggtcacaggcagagagcaggtccctctgctggcagccaaggagatgctcttggaggatacgtgcacaacttagctgggagtctgaagatggtggtgggttacaaagagctcagcgatgagcctggcccaagattctgaccccttgccctggatcctgagggttccacccttccctattcccaacaggtctcaagaattcttctgttagtctcctgccctcttgggacagccccgcacttccctcactttgataccctggtacccaggcatctgcctccttcattctcctccagctacccaagcacccccaggccctgctctctgccaaccctgatccctgaactccagcactttccaaacccacccccgaattgctggataatatagtggttctatttttagattttttaaaactctccatactgtcttctatagtggctgtactaatttaaattcctatcaacagcgtacaagagttcccttttctccacatcaccagcatctgttattttattttattttatttattttatttttgtcttttcagttgtggctattctatctggggtaagatgacatctcattgtggttttgatttgcatttccctaatgattagtgatgttgaacatttttttatgtatctgttggccatttatattcttcttctgaaaaatatttattcatgccctttgcccactttttaataagattgtttggttttttaattcttgagttgtttgagtttcttatagtattctggatattagtcccttgtcagataaattgtttgaaaatgttttctcctgttcagcagattgtctcttcactctgtcaattgttttatttgctatgcagaagcttttttagttattatagtcctatttgtctggttttatttgtgttttctatatttttgaagtcttagccataaaacctttgcccggaccactggcctagaatgtttcccctgttttcttccagttgttttatagtttcaggtctttcattttatttaagtcaacttgagttgatttttaatagggtgagagataagaatctaatttcattcttctgcatacgggatatccattttcccagcccttttactgaagagggtgtccttttcccaaatgtgtgttcttggcacctttgttaaaagtcagttggctgtaaatatatggatttatttctgcattctctattatgttccattgattggcatgtctgtttttatatcaataccattctgttttggatactatagccttgtaatgtattttaaagtcaagtagtgtgatggccctagctttgttctttttgctcaggatttctttggctatttggactttttaaaaatgttttgggtccatagaaatattagaattattttttctaattctgtggaaaaataaccttggtatttttgttggaattcccttgaatctttagattgctttgggaactatggtcattttactaatattaattcttctgattcatgagcatggaatatctttccatttgtttgtgtcctcttctttctttcatcagtgttgtatagatttatttttaagagatctttgacttccttgcataaacttattcctaggcatttttttctagttatcgtaaatggaattgcttttttgatttctttctcagctacttcattaataatgtatagacattatactgatttttgtatgttgattttgcatcccacaactctactgaatttacttatcatatctaatagttctttgatggagtcttcagatttttctagaaataggatcatttcattggcagggaggggagagaggctgaaggttaagctgatggccaatgatttaatgaatcatgcctaagaaatatgacttccatcaaaacccaaaagggcagggtttggagagcttctggatagctgaacacagggaagctaacaggaggtgaacaagaactcagccatgtgccagagagggtggcgcatcccaaccccatgggacagaagctcctgcactggaaacccttctcaccttgccctatgtgtctgttcatggggctctttgtgtcttttaaaatatctttttaaataaactggtaaatatatgtaagtgttttcctgagttctgtgagccattctagcaaattaatcaaacctgagaaacaggttatgggaacactgatttaaagcaagttagttagaaacacgggcaaaatggcttgagactggcatcaggagtgggaggcttgagactggcatcaggagtgggagggggacagtcatggggactgagctctcaacccatgggatgcgatgctatctccagggaaagagtggcagaattcagttagaggacacccagctggtgtccatcacagaactgattgcttgtttgttggagaaattccctacatttggtcagagaagtcttctgtgttgatagttgttgtggtgtgagagcagtggaaaacaacgtgagattttccacactcagagtggatctaaatgttgagttgcttttaaatttgacttagtcgtggcctgactaaacaggattagatgtgagaaattttttggtataatgtataggaaggaactaaaggctgatgaggatgggagtgttggaatagatgttctgtgcatgagtacccccttcatcctctctgtctcccaagaaccaaaaaatactctctctgcagctttaacaaatactggtttggaagagagtgactgcgtttttcaaagttctaaatggctatgattgcaggacctttgtgatgctcaggaatgtcctgatgtcagcggagatgaaggaaaaccagagattcaaaagtcaaaggaaagggccatttaccataattcatatcatacatatttcctggaaaaaaaagaaaaattccttggggaaaaagcatcaaaatcatcaggaagtcttccacacagaaatgacttcattaatttgatctctgtcattctttcttttcattcatgtattattatccatagagatttctatcctgtgggttttttatttaatttttgtttgtttggttttttcagacacagtgagaccctgtctcaaacaaacaaacgtcacaggctgcagtgcagtggcacaatcattgctcactgcagcctcgacctccctgtctgaagcaatcctccagcctcagcctcatgagtagctgaaactacaggaacatgccaccatgcccaactaattttttaaaaaatttttttgtagagatgaggtatcactatgttgccgaggctggtctcaaactcctgggttcaaacaattcacccaccttggctccccagaatgctgggattacaggcctgagccacgtacccagcctctatcccatgttttgattcatcatcatctcctaagccctttcccagcatcgatagtctactaaacatgccatgattaaattatatctctataccttgatataaacaaaaaattatatgagcagtaaagacaaatatgaaaaagtaaaattactgccaaagttattaggaggataacctaaattatttgggtaggaaaatctttcttttttattttatttttttttccagccagggtctcattctgtcactcaggctaaattacagtggcccgatcatggctcactgcagccttgacctcccaagattcaggtgatcctcttgcctcagccccctgagtagctgagacaacaggcatgtgagacaatgcctggctcctttttatatttttagtagagatggggttttgccatgttacccaggctggtctcaaacttctaggctcaaacgatccacccacctcagcctcccaaagtgctgggattacaggcatgaggcactgtgccagccttttttttttttcacatctgctggaatggaaaatatttcttaaatgagacacaaatgtatcaaattgaaaatgtttaaacttcaaaggacttacatacatatacagtcattcttcgctcaatggtgagatagcttctgagaaatgagtccttaggtgattttgtcatgtgtggacatcatagagtgtccttacatgaacctagatggtataacctacttcacacttaggctacgtgataagcccattgcttctaggctacaaattatatagcatgttaccgtatggaacattgcagccaattctaacacaatggtaagtatttgtggatctaagcatgtgtaaacagagaaaaggtacagtaaaaatgtgattaacaaaaagatctttaaaatggcgtatctgtctaggacacttaccatgaatggagcttgcaggactagaagtgccctgggtgagtgagtgagtggtgagtgaatgtgaaggctagggcattactgtacactacttagactttataaacttaggctacactaaattgattttaacattgtctttctttaataataaattaacttattaataattaactaataattttattatttatttattaacaattaataactaattaataattagttaccatagctttctgtaaccttttgaacttttttgttttattattatactttaagttttagggtacatatgcacattgtgcaggttagttacatatgtatacatgtgccatgctggtgtgctgcacccattaactcgtcatttagcattaggtatatctcctaatgctatccctcccctttcctgccaccccacaacagtccccagagtgtgatgttccccttcctgtgtccatgtgttctcattgttcaattcccacttatgagtgagaacatgcggtgtttggtgttttgtccttgcgatagtttactaagaatgatgatttccaatttcatccgtgtccctacaaaggacatgaactcatccttttttatggttgcatagtattccatggtgtatatgtgccacattttcttaatccagtctatcattgttggacatttgggttggttccaagtctttactattgtgaatagtgccgcaataaacatacgtgtgcatgtgtctttacagcagcatgatttatagtcctttgggtatatacccagtaatgggatggctgggtcaaatggtatttctagttctagacccctgaggaatcgccacactgacttccacaatggttgaactagtttacagtcccaccaacagtgtaaaagtgttcctatttctccacatcctctccagcacctgttgtttcctgactttttaatgattgccattctaactggtgtgagatggtatctcattgggttttgatttgcatttctctgatggccagtgatggtgagcattttctcatgtgttttttggctgcataaatgtcttcttttgagaagtgtctgttcatgtccttcgcccacttttttatggggttgtttgtttttttcttgtaaatttgtttgagttcattgtacattctggatattagccctttgtcagatgagtaggttgcgaaaattttctcccattttgtaggttgcctgttcactctggtggtagtttcttttgttgtgcagaagctctttaatttaattagatcccatttgtcaattttggcttttgttgccattgcttggtgttttagacatgaagtcctttataaactttttaaacttttctactcttttgtaatagcacttagcttaaaacgtcaacacattatacagctctacaaaaatatttttctttatattcccattctagaagcttattcctatttaattatctttaccttttaatcttttttggtaaaaataaagacatacattagcataggctgacacagggtcaagaccaacaatatcaaccatcttcagccttcacatcttgtcccactggaagattttcaggtgtaataacacgcatggagctgcatctcctatgataacaatgccttcttctggaatacctcctaaaggacctggctgaggctgttttaatttttttatatatatagaaggagcacactctaaaataacaataaaaagtatagtaaatacataaaacatagcatagtcatttattatcattatgaagtattatgtactgtgcatagctgtatatgctagactttttataggactggcagtgcagtaggtttgttgacagcagcatcaccacaaacacatgattaatgcatcatactatgaggttatgatggcttcaatgtcactaggtgataggaatttttcaggtccattaaactctcatgggacgacagtcatatatgcaattcatcattgacccaaacatcattatacaatgcatgactctataacacagtggggtgtgtgtgtgtgtgtttgtattttgtgtgtaagattaacactgaaattgaggtatcaactaggcaccaaggtaaaaacatattaacttttcctgtgaggtgtcaaattaccccatgcagaatttgaaatgcaaacgaccattggaggcttagaggtcttcgggttcaaaccgtcagagaatagctcattttaaactcatcctccaacagtaaacaagtataaaagtcacaaaaaacatacaatgcagttgtgcagccacaaaacagcaaccagcacaggactatcaccttttggagaatggaagttcctgaaagggagattcacatccttatcagctttctttccagaagcatttgccaaaatacaatgaagagaaatggaacccaagcagagaaaatcagtctcatcggcaaaggaaacagagatcagagttcaggcttggcacattgactgggatttaggggtagggtgctgagggagggagttacagacaagaaacccccaaaatctgcactcctgagctgcatatgctccagatgacactctaagaagcccactggagaacagcttcttggagattgcatgctaagtagaaatgtcacaggctccatagtgtgaggagatgttggaatttcagccctgcaaaacctgtgttgagacatcaggatggggaagccgtgtaagtgaggaccgtgaccttggagtaagaaccacactgaaatagactcaccctagcaaaggctaaaatcaagaggaagcagaatcaaagtgggtctgatttttactaaaggtgattctttgataattacctaactgtcaaactattaccagtctttggaggaagataacaaaacccagagcctctaaaatccatcatgtagaatatgtgccatgccaagcagcagagagaatgcagcaactaaagaagaaataatcaacagaagccaactcaaagatgatctgaatattgaagtcagcaaacaaggacattcttcaaaatatttatgattaatatgttaaggaaaatagaggaaaagatgggcaaactatttcaaaattcccagaaagattaatcataagaagagagaaaacacaaatgaacactatgagaagggacattataaaactgtagattttattaaaacaaaaataagagaaagttagacacaacttcatggaaagagcttttaaaatttaggtatagtgacatgagttcttgaaaaagacggttgaacaaagccaacagaaaactaagtagaaaatataaataatcctatatccattaagaaattgagttctaaatacattccttcccaccagagaaactccatgcccagacttcttcacctgtcaattctttcaaaaactttttaaaaggcatgtcagccttatacagtcttcctctggtaccttttgggatgggttctagggcacctgtggataccaaaatccatggatgctcaggtcccatatataaaatagcctagtatttgcctattagctatgcacatcctcccatatactttaaatcatctctagattacttataattcctaatgcaatgtaaatgatttgtaaatagttgttacactgtattgcttaggaaataatgacaagaaaaatgtctatacatcttcagtacagacataaccactgtaggtactcctaactacagagtatacatcagcaacaacataacattttcaatcctaaggttgttgaattcacagatgtggaactcacagacatgaaaggcagactgtgtgctatggtttggctgtttgcccacccaaatctcatcttgaattgtagttatcataatccccacgcgttgttggagggactcgatgggagacaatttaatcatgggggtggttcccctcatgctgttctcatgatagtgtgttctcacaatacttcatggttttataaggggctttttctgcttcggtttggcacttctccttgttgctgccatgtgaggaaggatgtgtttgcttcctcttctgccatgattataagtttcctgaggcctccccagtcatgctgaactctgagtcaattaaacctctttccttttaaattgcccagtcttgagtatgtctttattagcagtatgataacagattaatacactgtcttatattttttagataataaagagtaaacaccttccaactaattttatgaggcaacataagtcagacaaggacctaaacatgacaattatattacaagaaaaataaactcatcatcaaaatgatctgatgaacatagccaccaaaattccaattaaaatattagtaaatagaaccaaataatatatgaaatggataacacataatgaccaaatgggatttataagagaaatacatggtagatttaacttcaaaatgtcagaataatctaccccaagaatagagaaaagtaggacaacatgtggttatatcaatagatgcaggaaaaccatttgataaagttcagtaggcattcataataaaaactaaataaactagacataaaagggaacttccctaacagaatacagttatttacaacaaagaaatacaaagaaatacctaaatctaaagtcataattaatgaagaaatattaaacactcctctgaggtggggacaagagaaggatgtccactatcatcacttttatttaacattgtactgtgtgtccaacagcaaaaatagattacataagatatatgactgtcttcttcaaggaaaacattatcgtgtatgaagaaaatttaagaagctctatgaacagactattaaaaataagtgaatttggcaaggccagtataaagcaaaaagtaacatttctatacgtgagtaataaacagtgagaagaactgacattctttaaatagctctatgtacaataccacaaagaaacataaattgtagaaataaatataaaagttatacaaaatctcatcattcagaattacaaaacattgctgagacaaattaagtggatagttatttcatatatatgaagaagacaatattgctaagataccgtttatccacaaagtgatccatggagtcaatgcaattgtaataaaactcccaacagttttttttgtgggaattgacatgctccttctaaaatgtatacaaaaatgtgaggagcttaaaatagccagaacaatattggaagagaacacaattggaggacttaaactatcagatatcaacagatatttgaaagccatagtgattagaaaagtgaagtatttgttcagggataaacaaacaggaaaaaattattaaaatagagccctctctattttcttctatgagttttataatttagcccttacatgtaggtctctgatccattttgtgttgatttatacatatgctgtgaggtagggtttcaacttctttgttttttttcttttgcagagacagtgtctgtgtcacccaggctagagtgcagtggtgcaatcagagctcatggtaaccttgaactcctgggtccaagcaattctcctgtctcagcccctcaaaatgctgagattgcaggtggagtcaccacttccagcccctcaacttcatcctttagaatgtgggcatccaggtgcccagctccattagatgaagagtgtatactttaacacattgagttgtcttaacacctttactgaggttctttgcatatatctctttatgtgtctctgagctgttgtctagtgccctttcattttaatctgaatgactcacattagtatttcttataggaaaaatctactggcaatggaatctttcagttagttgttaattaactggaaacatctcaatttctccttcatttattttaatttattaattgtgataaaatgcacataacataaaatttaccatcttaaccatttgtagtggtagtgttcagtagtgctaagaacactcacactgttttgcaaaccaatctccagaactcctttcatattgcaaaactgcatattttcatttttgaagaataagttttctagatatagaacttttggttgacagctttatttttgtagcactttaaacatgtcataccactctgactttcctcagtgttttctggtatgaaattggctgttaatctcaatgaggatcccttgtacatgatgcattatttgtttcttgctgctgtccaagttctctctgcttctatttcaacagtttggttataatgtttcttggtttggatgtctttgagtttattctgcttggtagattcacagatttttatcaactttggcaaggtttcacctgttaccctatatttttactctctctttctatctctcctctactttgggaactcccattatgcatctgtcagtccacttgatgctgtacagaggtgtcatagcctctgatcatttccctttatttttttttcttcctgctcttcagattgcataatcgtaattggcctatcttcaatttgctggttcttctgcctgctaaactctgcatatattagtcagcatggcagtgtcccacaagtcccttaggctctgttcactattttttgttccttttttcatttctattcctcaaagtctatgatttaagatgacttggcttcgagtttgctgattctttcttctacctgttcaagtctgctattgaacatctctaatgaattttttttcagtaattatattttcccttctagaattgctgtttccttattatatatatatatttttttttattttaatttttattttttttattgatcattcttgggtgtttctcgcagagggggatttggcagggtcataggacaatagtggagggaaggttggcagataaacaagtgaacaaaggtgtctggttttcctaggcagaggaccctgcggccttccgcagtgtttgtgtccctgggtacttgagattagggagtggtgatgattcttaacgagcatgctgcctttcaagcatctgtttaacaaagcacatcttgcaccgcccttaatccatttaaccctgagtggacacagcacatgtttcagagagcacagggttgggggtaaggtcaccgatcaacaggatcccaaggcagaagaatttatcttagtacagaacaaaatgaaaagtctcccatgtctacttctttctacacagacacggcaaccatccgatttctcaatcttttccccaccttttccccctttctattccacaaaaccgccattgtcatcccggcccgttctcaatgagctgttgggtacacctcccagacgaggtggtggctgggcagaggggctcctcacttcctagtaggggtggccgggcagaggcgcccctcacctcccggacggggcagctggccgggcggggggctgacccccccacctccctcctggacagggcggctggccgggcggggggctgacccccccacctccctcccggacgtggggctgaacccccacctccctcccggatggggcggctggccgggcggggggctgaccctgccacctccctcccggacggggcgtctggccgggcggggggctgacccccccacctccctcccggacgggtcggctggcccagcagaggggctcctcacttcccagtaggggcggctgggcagaggcgcccctcacctcccggacggggcgtctggccgggcagggggctgacccccccacctccctcccggagggggcggctggccgggcggggtgctgatccccccacctccctcccggacgggtcggctggccgggcggggggctgagccccccacctccctcccggacggggtggctggcctggcagaggggctcctcacttcccagtaggggcggctgggcagaggcgcccctcacctcccggacggggcagctggctgggcggggagctgaccccacctccctcccagacggggcggctggccgggcggggggctgaccccccccacctccctcccggacgtggggctgacccccccacctccctcccggacggggcggctggccaggcagaggggctcctcacttcccagtaggggcggctgggcagaggcgcccctcacctcccggacggggcggctggccgggcggggggctgacccccccacctccctcccggatggggcggctgccgggcagggggctgaccacccccacctccctcctggacggggtggctggccaggcagaggggctcctcacttcccagtaggggcggctgggcagaggcgcccctcacctcccggacggggcgtctggccgggcggggggctaacccccccacctccctcccggacggggcggctggccgggcggggtgctgatccccccacctccctcccagacgggtcggctggccgggcggggggctgagccccccacctccctcccggacggggtggctggcctggcagaggggctcctcacttcccagtaggggtggctgggcagaggcgcccctcacctcccggacggggcggctggctgggcggggagctgaccccacctccctcccagacggggcagctggccgggcggggggctgacccccccacctccctcccggacgtggggctgacccccccacctccctcccggacgtggggctgacccccccacctccttcccggacggggcggctggccgggcggggggctgacccccccacctccctcccggacggggcggctggccaggcagaggggctcctcacttcccagtaggggcggctgggcagaggcgcccctcacctcccggacggggcggctggccgggtggggggctgacccccccacctccctcccggatggggcggctgctgggcggggggctgacccccccacctccctcccggacggggcggctgccgggcggagacgctcctcacttcccagacggggtggctgccgggcagagggactcctcacttctcagatggggcggatgctgggcggagggtctcctcacttctcagacggggcagctgggcagagacgctcctcacctcccagacggggtcgcggccgggcagaggcgctcctcacatcccagacggggcggcggggcagaggcgctccccacatctcagacgatgggcggccgggcagagacgctcctcacttcccagatgggatggctgccgggaagaggcgctcctcacttcctagatgggatggcggccgggcagagacgctcctcactttccagactgggcagccaggcagaggggctcctcacgtcccagacgatgggcggccaggcagagacgctcctcacttcccagacggggtggtggccgggcagaggctgcaatctcggcactttgggaggccaaggcaggcggctgggagatggaggttgtagcgagctgagatcacaccactgcactccagcctgggcaccattgagcactgagtgaaccagactccgtctgcaatcccggcacctcgggaggccaaggctggcagatcactcgcggttaggagctggagaccagcctggccaacacagcgaaaccccgtctccaccaaaaaagtacgaaaaccagtcaggcgtggtggcgcgcgcctgcaatcgcaggcactcggccggctgaggcaggagaatcaggcagggaggttgcagtgagccgagatggcagcagtacagtccagcttcggctcggcatcagagggagaccatggaaagagagggagagggagaccgagagggagaggggagaggggagaggggagaggggagaggggagaggcagaggcagaggcagaggcagagcaggaattcagatttttttttttccttatatttttaatgagtctttatttggtgagatattgttcttctggttcctttacatatatacatatatatatacacacacatacacatatatgtgtatatatatacatatatatatacacacacatacacatatatgtgtgtatatatacatatatatatacacacacatacacatatatgtgtatatatatacatatatatatatatatatttacatatataaagagagagtccacggtcttttttatctatttgagcatatttaaactattggtttaaagtcttggtctagtaagtccaatgacttggcttccttagggacaggttctgctgatgtatttttttctgcaaatgggccactttcttaaacttctaaatacctcaagaattttcgctgaaaactgaacactttgaatacaacaatctagtaactctggataccatattctttccactccccagagtttcttgttgccacttgaggatggagttgtttcttagtgacttttctaaactattgttaagctgttctatgtcatgtgtggtcactaaaatctattctgttagcttcatggtcagctagtgatttgacagaggtttccttaaacagctggagccaaaaaaataaataattaatgccctcccaggttttgcagatggactctgagttgggacacttcttcaacacttaaccaggcagtttagacgtccaccttaaccttcactggctgcttacttggaggctaaagatcacccagaggtaaaagcctaaggtcatctcaggtctttttaaagagtgtgggcatccagggctaaatatccagtgtttagccctggccatgtatgtgacattctgatttcctcagtatatgcgggatattttgaaagccatattgccttatgtatctccatctccagcctctacctccctaggcttttcagtctgtctgctgttaacccatccatcattccatgccccaggcatctgtgactagtatttgcctttaaatgcttttgacaaacattgctatggagacctctccaatcttaataaagttccaagaggagtgaagcaaagaccagcctctaagctgatctttttgggggctatcatacatgtcaaaggacacaaacacaattctttgaaaagaaagttcattttgccttttctggcatcaggaaactacaccaggaatgtgggacaccgtccccatggctgcctcatagctgagggtgtgggggtgggagtgagtaggtggctaaggaatagtggcacatgctctcctaccaaaatctagagctcctttttcattaagcactactttggttgttgtaaaaaaaaaaaaaaaaattcatagactccagagtacagaaaaacttaattttgatagtttttttccaggttaatagttgctttagttggggaatgtgttgttggagttctctaccatttttggtgaaggcattacagttgtcttttaataagattttaaaattatgaaaaaatcttatgtatctacccatgtgcttaccatttctggtgctcttcattacatatttgcttttggtataattttctttttgcctgaaggactgaaacacttattacagttcgtgtctgctggttatgtattttttcactccctataagtctaaaatccctttttttatagatatctttagagtctgttaagtagcttgatgcaatcattacacatggtatacatatatcagtacatcacacagtacctcatgaatgtattattatatgtcaattaaaattatacatatatatatgtttttaaaaggttttttttctggaaatagaatctagtttgacagcagttgtctttcagaactttagcgatgttggtcatctgtccctcatttgcattgtttccaatgaaataactgctgtcatctttattattcttcttatgtgttgtgttttgtgtttttcatttttgctttctgctttttcaattttctctccttctctggttttgaacaaatacgtgttactctcactcacaactataaagcgaacttaggaaacaatctatagggagagtttgttgatgattggttatacattttcagaaacagttgtttattccttcctttacaaaggctaatttccttagaatattattgtattgaagaatgtcataaataattttatttgtcacctggacctggtgccaagatacgtggtcaagcattattctggatgatctttttaggatgtttcttggatatgattaacatataaattgctatactttgagtaaagtagattgacctctataatgtggacaggcttcattcaattcattgaaggtgtaaattgaatgaaacactgaccttccccaagcaagatggaattctgtcctgggatttgaactgcagtatcagtcacctgacccataaagagctggttggtttgtgtacagcatttgcaagatgaatggacaacaccctgtttggaagtctacccctttgatcaaagaagataaaaacagaacagctcttgtgggctgaattgcagggtgttttcttagcagtgatggaagaattgaacaatgataaaagctcctatgttttagttttactgacttatgggcagtgactgatggcctggccatataattaattaagaaagcagtggaaaactggcctatgaaaagaatgcccatatgagacacagtcctatggaaatcactatggtaatttgaggggtgcattaacgtaagacatgttgatgcctgatatagattggatgttgtccccacccaaatctcatgtcgagatgtaattcccagtgttggagttggggtctggtgggagatgactcaatcatggggtggtttctcatgaatggtttagtaccatcccctcagtgctgttcaatacccatcagaataactcccttccaggtttggaaggtgattgaaatcaacaagcatttatctctaagtgcttgccaggtgcacctgtagtcccagctatgagagtgtctgaggcagaaggatatcttgagtacaggcatttgggtttagcctgagaaatatttgagtctagcctgggaaacatatcaagaccacatctcaaaaaaatttacatttgcttgtgaagatcaccggggtctacgaaataagtagacactgaggctgtagcaatgcagagatgggctgaatcaagacatactccccttgcatcccccacctctaataagcacaaaatactcagtaaaactgttctttttaacaagactgggcacagtggctcacacctgtaatcccagcactttggcaggccaaggtgggtagatcacttgagatcaggagtttgagaccagcctggccaacatggcgaaaccctgtctcaactaaaactacatcaattagccaggcatggtggtgcacgcctgtaattccagctactcaggaaactgaggcaggacaatggcttgaacctgggaggcagaggctgcagtgagccgagatggcgccactatactgcacccagggcaacagagcaagactgtgtctcaaaagaagaaaaaaaaagaagtattctctttaacaagaaaagagacagagacagagaccaaaaaaaaaaaaaaaaaaacgtgaatgggaggtattgccaccatgtggaccactgagccacattacactaggaaacacacttgcccagaatgtccaacaatggtcagagaaatttgttcctcagaagaagagtttcagagagaattaaaatagtcatttgaaacattgagtgtataaatcaggagcggggagacataagcatgaagggcgggcctatacaccttcatgagtgtgctcgctcttgacatgagtgtggacaaaggaatgtccccactagagagtgtcctctttttccctgctggatcagggaaaggtgctggtgtgattctacatacaattcttccctaaaaaataataaataaataaataaataaaaacaatccttcccaaggccagaagacactagaattatgactatactttacctcaacttgcttttctcatacctgatgcagtggtctcaggactagggatgcaaataaaagtccaggcacaggaattattcctgagcaagaaaccgttaacatatttaaaaaccattatgcaagactgcctaagggcctggagtagatgtgccttcactgcatctggcaaagttggagctaacattgaatgcagctgtattgcctggaagccagatagccaaccagttctctgcctgaataaccctaacctctatgaactggaatggactgatgggagacactcgctgttactagcatggtatagctccctgcataggccagcacagcaggaaaacctaatgtcccttccaaaatgagaaatatttggtataaatgcagaagaggaagaatagtagctgaggtgaaatgaatgaataaatggggtatgtaatgaggaaaatccaatataacatgatctcctcaaaagaggtataaacgaatgatgatattgtcttttatctcatttttaccagatgtctgaaaggttgaagccatatgttgctgagaccattgctatttttggactgcaatgggcgaattgataatgactaaacaggactctggtaatgggccagtatctttttactgctatgattcttctgctataggagatctgtggttggccaagcaaaggggctcacatttataatttcaccactttgagaggccatggtgggaagattgcttttgaggccaacagttgcagaacagcctggggcacataatgagactgcatttctacaaaatatttaaaaattagtcagccatggtggtgtgcacctatagtgccagctgctcaggagacttgaggcggaaggatcacttgagtccaagaatttgaggttacagtgagctatgattgtgccactgcattctaccctgggcaacagagcaagacattgtctctaaaataaaataataaataaataaatagaaattataagaagaaataatgtggttaaagaccaggaagtgatctgtgatccaataaatatatttggtctttgcccctagtccctgacaggcaggtcctaaaacgcttgcagtccctcagtgataagcatgattttaatatggcaatgagatgactatggggtgaggggctcctagatagtttcaggatggaggctgcttgccagaaacaccagctgtgattagaggattggaactttcactgccatccccatcctctggggaagaaaagggggctggaagttgagctcagtcatcaatggccaatgatttcaccaatcttgcctacacaatgaaacttccatagacacctctagacagtgagttttggagaacttcccagttggtgagcacatccgcatgtccacgtgctgggaggacggcacacctcatctccatagagacagaggcttctgcgcttatatctttctgtaaggcagacacccttgtttctaggagggacctagggtggactgtggattctttctctggggcaaataaaaatgtagaatcagaaaattcaggcactttgcactcctcatgggacactccagcagcactcacgtgaccatcctgagaatggacaggacacctgaggtggggaagggagcacagaacccagacaccagcctggacacaggcacctgggataatctcctattccttggaaagttccagtatctgagggaggaacagtcacttctggtcctgacctgagtggagaccgagggactcagaagagctggaatcagacccccacacacactgagtatgagtcagagaacaaggcctgagagaaaaagtcacagtgcccaagactgctgcaggggtcaaaggggactgctgatcagtgttccagggatttgctccagattaatctgagtcatggaaaaactgcctttcttttgtttctaaacaaatacctgcaaagacaaaagaccacataaatccccaggtgcacaactttttcagatttaaagaaaaaacaacccccgtctttccctccattcccaggagaagctcactctgtggcatcaagctgcctgggtgagctctcttctagaagagtccagggggacaggcaaggaatgggaggcaggaagtccagttcagggagggggattctgggatgaaaagtgaagggagagggactgagcccatgctgagggtttttctctggtttctcagacagctccggggccaagattcggggagacattgagacagagcgtttgatataaaagaagggggtaagagccaagtcccagggcccggagcttggctctctgggcttcaggccccgagggcggtgcctgggatgggccggctcagctttggggtttcccgagctccgctctctctcttccacctttcccaacctgtgtcaggtccttttacctggatactcatgatgcggcctcagttctcacttccattgggtgttgggttcctagatcagccaatcagtgtcgccgcggttcctggttctaaagtcctcgccggcccaccgggactcagattctccccagacgccaaggttgcgggtcatggagtcccgaaccctcctcctgctgttctcgggagccgtggccctgatccagacctgggcaggtgagtgcggggtcgggagggaaaaggcctctgcgggaaggagcgaggggcccgcccggaggagtaaatctgcacatatatttaattacagattacaattacaatcaaggcagaaatgatctcatttttacattacaactctggaaaaggcaatagactgagatgcaagtgtgcccccaagtgatgggcagaaggagagaaggtgttttggatgcattctagaacacaggtaatctaaggagagttgatcaaggccgtggaagagtcctccagccactattggccatcaaaggagtcctctgtgtcccaggaatggtcctgctttggtgtccctggtgtgacccatcacccgctgggaacagcctgagagaagtagggcctctgcaccaatgctgctgaggatgtcagagcacaggaacgaggccttgggaaattacctggaaatgcgactgaaatcttccttcctgaggggtctgggctcttggaaatcaaaccctctcaggttgggtggctggacgattctcctcacacttacaatgggacaaggggaaccaggaggcccccaaggggatccctgggttccacacgaactcctcctaccctcattgtgtgacagcagccatgcctcctcctggggatcaggatctattacctgtgcctggagaggaggggactcctcttctcacccgctggtctctggacacatactgtccaattcccctgtggcagctgtaatgtgtagttcaatgggcactcatttgtctccttttaagggtaccctcctttagaatccaggaccttctaccctgcagagtgtggttttgggagagaagtgcaaaatcccacgacaggtgagttgaaggaatgggatatggagccacatccacttccaccccttggtatctggacccacgtgttcttcctactgagattacagaactgtagagatgtctttgatttttaaaatgcaccatgtcctgaaagatggcaccctcccacccgcagagtgcttcctgcaagctggcgttgagctgtgcctatagaagctcttttcaacattctttatggccagcagcccttggttggtgcagatggtgataggaccagtgggtcccacagcatggccacactgcacctccttcgctgtcaagtgggtcccccacgaagatactgcacggagagcagtgccaagcctgtggatcaggaatatcaacagcccccagagagtggtgctggctgagggtctgagagcaggacaggaaaacccacctatggaataggtgcctatccctgtgaagatgaacctctggcccttccaggatggaaggagtgcaatgtagtcaactcctcacttagggtctggttggtcacctaaagaaatagagccctaccagggaagatcattgggttcaaatgctgatgagtaggacatttagaggtggcagtgtctggatctaccttggtaggagggagtcagtactgttggacccataggtagcctcatccctgccactgtgtttgctccatttatgtacccatcctacccggcctgggctgacccatggggaaggctggctaatttcagtgcttctgcttggttgttcagggccatttcaggtttgggtgttttctggggatgttaacatgggattcaggctcaactcacaagaaacttttccatctcatgatggatgctgttgggcatgtccaatgtatgacttcatgagttacacagatgctaattcgtaggggcacttggaatcacatggttgttttgtgtcccatggtcaagcattctatcttatcagggcctacagtaacatgccaaaagttgcttccaacatatttctctgctttggatggggcatatttctgtgctgtggatgacatggccttactccagaatcccaggccctccactgtgactctcctactggtgcttggttcagctccaccccaaatcttaccccaccactggcactttcagcaccagggggtctgaaggatggtgactgcgccatggcctggatctgctgcagtgtcctttcctgtggaggctccactcaaagctggcatcctcctatgtcacctagagtgtgggtcaaagcaatacacctacatgtagaatgtgatgtcagaactcaaacaggctcaccaggcagtgtgcttccttccttgcatgaggatgcaagatgcaacagtttgtctttcacattggaagggacacccctggatgcccctaaccactagacctgtaaaacttcactgcagtggccacttctgaatctctgtaaggtttatttatcttcaccctctggagagaagatgttttaccaaagcctctagtgtaccttcctcctcttactcatccatcccagtcaacatgatgttgtcaatgaaataaaggaatttaatattctatagtatatccaggttctccagatctcttaagactgtactatagaggcctggggaattataatagccctgaggcaaactatgaattaaagtgttgtggatcccacatgaatcactttatatccacttttgtgtgtgtgtgtgtgaggcagagtcttactctgtcacccaggctggattacaggtgcacaccaccatgcctggctaatgttttgtttttggttttggttttgtttttgttttgtttttggacagagtttcactctttttgcccaggctggagtgcgatggcatgatctcagctcaccgcaatgtccgcctcccaggttcaagttattctccttcctcagtctcccaagtagctgagattagaggcatgtgccaccacgcccggctaatttggtatttttagtagagagaggttttctccatgttggtcaggctggtctcgaactcccagcctcaggtgatccgccctcctctgcctcccaaagtgctgggattacaggcatgagccaccacacccgggctatatccacttctaattggaatggaagggaatgcactcaccacatccacagctgcacactgtgtgcctgaggccttattaatctgctctaccagatatatccagccagcatgctagctgcaatcaggactcctacttggtcacatctggagtaatcccattcattccttagtaatcccattcattccttaggctccatcaggcttatttgctaaattacatggagataataggcaaccccaacaccaccccacatcctccagctctctaatggtggtgctacccccacagcacttgcagtgccttccacaagattcaccctgggacatatgatcatttttgatttggccagaatggaggcagtttcagaggtttccctttggccttcagcacaatgagagcccttactccacagactagggatgcagtgtgggggtgactccagctgccagggcatcagtgtcaattatgcactaggagaatggggagataaccagggctgggtctgtggactcagtgaccccatggtgagccgtgatgtgtccaggtttatttcgtggtctccgtaatccccaatgtgagggggtcatgatgatgctgtgggcctctgggcatcaatgtcatctcacacccaaagtcagtactcccccaagttctccctatttccctttcccagggtacagtctctaaagtaaatggctgtaggtccctttgcacaatggctcagggaattgacccagcatacacttgccacagggttgcagggtccttcctcctaggaatatggacacctcctctgtcactgggttctgaatctgaagcttggctgagatctaggcactgagaatggatcatgattttgtattggttcaaacaccctcagcctcctgctcctcaattcttgctttcttatcatagataccaagcagtgctcttgctggctgcccttctgttctgaccctggaacaccaccctctattaaccttacccacaactgcaggcaggtcaagccccctcggctgctcctctggggttgccatggtaaccgtgtcctctggcttttgcaggtcactgccaccacttgttctctatctcttcagggccacaccctctccgtggatattaatgagcccaactctgggacatcttttcctaccatcaccctcagccttcagagaacaatacaatgaaacttcttagtgatgcaggtccctgttgccagcacgttcctgaggctctggtggaaggtgggccccctgggtcctcttataaagcacggttccggtgggctttccggcctcacgtaatgtctccatcccacaggccaaattcccccagcctcattattccctcttctacatgttccggggcaactaagtcaggtctagcttgtgagataccggcatcattttttcccagtctacatggatcaccccagcagtgggtttgccccatgccctggggtctttgaaaaacccatgtgatacggttggctgtgtccccaaccaaatctcgtcttgaatttccacgtgttgtgggagggaccaggagggaagcaattaaatcatgggggcaggtctttcccatgctgttctcatgatagtgaataagtctcatgagatctgatggttttaaaaggagaaatccctttcgcttggttctcattcttctcttatctgctgccacgtgagacatggctttcaccttctgccgtgattctgaggcctccctagccacatggaactgtgagtccattaaacctcttttggtaaattgcccattctggggtatgtctttatcagcaacatgaaatggactaatacatcatggcttgagaaagtgttcccaagtcaaaggatttttatctatctagcttgaaattctgtccctttgatcaaatgccctcaaattccaatcccagaagtgttccccaggatcctatgtggacatgccagctagttcctgcaaagctcctgagtggaattcctgctgcattataagggtgaggcttctgcagcatcttccagcgtaggaagtgggaaccattactggaaaaggcgagccttctctgcatgcccagagggtactggagggcacccatctgataatgctgtcctagtttgcagaatctcatgtttccccaccagggccctgattttccacaacaggcctgccttggctgaatgtcaaacatctctggaggtctgtaaccctcacaatgatatcttcagctaccattccacactatctaccctttcgctacaggaaataagggcctctccatgagacactgcagaggcctcacacgtagccagtgacagctgttagaatccctcagattctcattctccttttatagggcatcaacacagctgagcagtaaccagccagcttccctgttgtaggttttccctcccaccctgtcattattgtgtagaggcttctatcacaccacctgccatagcacccgggaaccagggcatcttctcaggtccgtgctggggatatccacagcagctcagctgcaccttgtgccatggactttctctgtccccaaccaacgtggatggcattctcggcctgccaggcagtgggcaagctcagccccaatccccgtttttgtctgtgtctatggaccactcctgaagccacttgtgttggttagcatcccctgaggagcagactgcaatacagaattaaatgtgccaggatttattaggggaaatagccatgaaagaaattggggagcaagacagaaaagactgggaaagccataagactgtgacgcaagtggcttttttatttttattttttgagcaatctcagctcactgcaacctccacctcccaggtgcaagtgattctcatgcctcagcctcccaagtagctgggattacatgcatgcaccaccaaacctggcaaatttttgtctttgtagtagaggcgggttttcaccatgttagctaggccggtctcaaactcctgacctcatgtgatctgcccaccttggcctcccaaagtgctgggattacaggcgtgagccactgtgcccaaccagactgcaatgcaagtttaaaccccagtgaaggagagagggaaggaagtttggctgaaagtatcctagacccagtgcaggttaagagaagttcagtaagggtgagccctggagcctcagtgggcctttaaaggagggacaatcctgtctttgtttctcctcttctctcaattattgaatcgaagaagccaatggcaagtatggtctgagagcaaacgtagcaatagatttcaggcggcaacagctggagcatcatcagttgtgcttcctctagctgaggggctgggatgtgcattctcaagactgccacaacaatccagtggggagaaaggacaaagggtaatgatcaaagagaaaaaaaggtatgaactgatgaactgatacctttaagtagatgagaaggatgatgtttgggacaccagtagagggactggctctggctgggagcgggaaggttaacccacaacaaccatccatgtggtagaagacccagcatgcagtgcagctgcaaatgcatgagcagatggaatctgtgaaattgtcttctagtgtgttcagttttctcagtgaagtaggaagcaaggtcatcagctgaagtaagaatgcagatagaaggttggatgtgtgagcagagagaaggtgtgtgagagtcacccagaccagtaggaggctgagggtgagccatgcttggagagggtgattgctggtcgtggtggggggtccccatgaggtttgggtcatgaagttagagagagaagtcagcatgctgtgtgctgctttccagcctccttcagctcatgggggcaggtgcagtgtaggcagaggtggattccaccagctgtgtagttttgccaaacaagtatggcaacgcaagggaggggcaagggagggatggaaattatttacaatagaattcaaaatggctgaagagggaggagaggacatcaagggtgagggacagtgagtagatggcaggatcactggattgggaatcccagagtgggtggaaggattgttggaattgatgtactacagggaagactccaagcctggaaagcaggcacataggcaatgagtggttcactgatattacgtcacagcatatgataaaatgatagtataagtatcctcagagcctgtggcctccgtgcaaggggatgagtggaaagatggtcagagaatggaaagtgtgagatagagagtatggaagggctggggttcttggccatgatgagacctaggactctttaggggagaacaacaacaaagcaacaggatcctggtgtcagggacagaccatggccatggcgggatgatagcagctctcctacgaaataatgcttatatgacaagggcatgagattcaggcagagagaggagaaggtcatggaggagaggagtcccagcatctgagaagccagagggcgatgcatcctctctgctctatgggtgtttattgctgccataaaaattaacacaaaacaagtggctttaaacagcatctctttatcatgtcacagtcatgtgtgttacaatttcaacagtctcatggggctaaaatcaaggtaaggggaggtctgtgttccttctgactctgaggaaaaatctactgtcaagctcattcaggttcttgtctgaattcacttccttgcagataggactgagatccccacttccttgctggctcctgtccaggggccacccttagctcctagagccctctctcagttcctcacacatatcccatgcaacatatccaatcctcctgcttggaacctctgacctcccccttctgcggtgtctcctctgccttcctcctctgcagcatctgactccagccagagcagcttctctgcttttaatggcttgtgagatttgatcgggcccacacagatagtccaaaataatcttgcaattttaaggtccttaatcttcatcacatcagtattttcccttttgccatgtaatgcaacctactcgtgggtgcccaggattgagattggatgtctttgggaaccattactcggcccatcacatctgagtatgttgaagtcaccgaggatcaaggagacagcactgctggagagggcgatagtgaaccaggaactacaagagtcaggactgagaggaacggcctggggcccacagggaatggctgcaatgaggggagtggggcctgaatctgatgacagctttgggggcttaggaaggaaggaggcagaaaggtctgagaaccacagtgaggagtgaggatgccaccccacctctgggccaagggtacaaggtccctgtgcaaactcccccatgtgggaggactttggaagggaccacatcctctggcagacacagacatcgctggagctgtgaggtccaggaacatcctgagacaggatgtggaggttttgctgatcatgggctgagaattccaaggggcacagcgggaagacttctggatttgggaatggggtatggggagacaaaataggggtgtgcagagccttgtggggatgtgaatgcagggtgtttgggggacccagtgtgactgacacaaacagggaaaaggcatgatgagctcagtcctggtggactcaaggcagatgatggtgctgaggctgtgggagacgagggaggaggctcaggggtggctttcacctgggctctgtccatggaggtgaggacagtgagatagttgggcctcagtgctgtgtggaccctttcttgtctccctgatgactggatggagggcctggaggaagaggggtcttagaggattcactcatgtccctgggggagggggactcactccaggtctcaggtctgcactgacacatttgtttgtggcttggggctgcctgctataaactattgggggttcgtccattttggagttataacctaaggcagaaactcagatggttcaaatgtcctcttcatgaagcaatgttatcagcgtataatttagattgtcttgcaagagtctcatttgttgtttttctaaatgcctgccaatattgtttgaaaatctacaaatgtgataaatgtatcttcaaagttaactggttgcaggttgtttaaccttatatgtacagtttcacatatgtataaaaacagtagtttgggcctcttatattctaataattaagactttaagctgtgtacacattgcaatgcaagtatgcgtcatgcataaccctagcactaagagtcaagagggaaagtacctctcccctaacattttacaaagtttctgtgttctttttccactgagtgggaacaagtcagctagtgaggaacatgaggcctttggcctcatctaaagatactttagctaccaattgtgagaagcactgaccaccgggaaggcctccctgcctggttcctggacctctataccatggcagaggccatcttccctcctagtgcagagtgatgtcccaggtagtgacctggttagccattgtccactctcgggcagttttgccttctaagacattggtttttctctgaggacctccctgttttcagatgatcaaaactggggccatccactcccttctgaaccacctctgcccagtggcctgtggctgtgcccccagtcacaacaggacaccccttcagaacacgctgcaggaagccgacatctctacacaggctcacacatgcacagtgtgtgcacggagctttggttctagttcaggaagaatgggaggaggctcactagtccaacagagcttgagccctgtaccagtgtcatattccaggagccagagttacaagggatacaaagtgcccagacctaccagagaaggcaaacccctacagcatgcagggctagacaggggcaagaaacaaggtcattctgggccagcaagaagagggaaagggaaattacagtcatacttcagatatatgcaggtttggctccagaccatggcaacaaagcaagtcacacaaatttttcagtttcccagtgcatataaaagttatatttacacttgactgtagtctcttaagtgtacaatagcattatgtacaaaatgaactatgtacataccttaatgtaaaactactttattgctaaaaaatgctaacaatcacctgaggcttcagctaatcctaaccttcttgctgtggagggtcttgcctcaatgttaataattgctgactgatcagaagggtggttgctgaaatcgctgtggcaatttcttaaaataacacaacgaagtttgcagcaagattattctcctcacttggacacttagaggccattgtagggttactaatcggcctgccttcaatatttttgtgtctcacagaatagggaaggccgggagagagagagagagtcaagaaaccagccagttggtggagaagtcacaacatacacaacatttatcaataaggttcaccattttataagggtgtgggtcatggtgtcccaaaacagttacgagagtaacttcaaagatcactgaccacaggtcaccatacaggtgtaataatgaacaaggttgaaatacttcaagaattaccaaaatgtgacacagagacatgaagtgagcacatgctgttggaaaaatggtgccaaatagacctgcttgacacagggttgccacaaacattcggtctataaataaaaaagcaagaaaaaagaaagaaagatggaaagaaagaaaaagcaaaggaaaaaatgcagtgtcagcaaacagtaataaaggaaagcacagtggaaggtgcacctgcaaaggggaaatcagcactgaagcaaagtcaggaaaagctttcaagtcagatgggcctggacctgggcatgaaccctccaggtcctcccaccagccagctgaagaggcctgagcacatctgacccagagctggccccgacagacacttgcccagtgagtgagtgctgaatgaaaccatctgagccagtttcctcatctgcaaaccagtgacataattcctgccttgcagagtttcagaagaataagtgagaaaagacacagtgccaagagaaacagacacaagacctgtggcgggctggacaccagggctctaaagcaagttctgcctaaactggcaagaacatttttcaggtcaggaacaggagttgttctggattctgtctggggtcaggctgggagggagctgggggtggcagagtaggatgggggcaagggctgtggcagggcctggcactgaagtgaggccaaagcctggagagagtggctcctggtggcttttgggcagctcacgcaactccctgcctcacccactgtgtgagtcagcgttctctagaggagcagaactaataggatgtatgtacatatgtaagggagtttattaaggagaattgactcacacgatcacaaggtgaagtcccacgacagaccgtctgcaagttgaggtgcaagaaagccagtgatggatcagtccaagtcccaaaacctcaaaagtagggaagctgacagtgcagccttcagtctgtggccaaaggtgtttggctgcagattccaggacaggaccttcttgtcctctgcagtgaccccccacctcgcctgactatatctgtccaacttgatggtgccaccgagggttctgatgcagggaaggagctgtgtgctctgtgtgggaggatgccttctgcctttctagctgggcctcaggtcagggctatgagcctgagcagggagaggagatggaagggagatggccttggagcaaacgtctgcccctgccagtgcatcccgtaggtatcatcccatccaccagtgccttggcaggaccccactcactcaaccctccccctggtggtagtccctggtggtgcctcctcaggacctcctgcctccagccgcacaaatccccaagaatggcacgtgggtacaagggtgttgggaagtgtcatcctccagtgctgacttgagtgtgtgtgtgtggctgcacacgtgtgtgcatgtgtgcacaagtgggaattggagtgtgtgtacacgtgtgtaagtgtgagtgtgagagtggagcatgaatgtgcaggtgcccacaggcagcagttggggtgccagtgtcctcactcctgcctgctttcctttctctccaaaacgtgaccacacagcaacttagtgactatctagatttaagtctatcaaacagaagggaaacacaactaggattcctgtagtgtagggaagggaaatgcctagcccagctctctgattccccttttaatgggtttgagctgcaatatgggtgcagaagagcctcccacagcgccactggtggtggaggaaatagcccctctcattggcccattttcacgctgctgataaagacatactgggaagaaaaagaggtttaattggacttacaattccacatggctggggaggcctcagaatcatggcggcaggtgaaaggcacttcttacatggcagtggcaagagaaaatgaggaggaagcaaaagcggaaacccctgataaacccattagatctcgtgagactatcacaagaataccacgggaaaaactggccccagtgattcagttacctccccctgggtccctcccacaacatgtgggaattctgggagataccattcaagttgagattcgaatggggacacagccaaaccgtatcactggatgagagcaattagattgatgtcatgatgtatatgggtccatgggaacttgaaaaagtcttccccttccacctagtttaacaagataaacaggaaaggaacttcccttaagggaagatattgactctatccctgaaattaaatcacaagaaaataagaaatgcatgagatctaaactaagccatttgggtaaactgtctcagaatttaaagcatcagcagtcacaagctatcagtatcagtgacgattctttcactccatggtctagtccaacgagactggtcagggcttgccgcctgctcctcggtgctgtcctggtactttgaaagtatctgtgattctgtgaactgcacccccagctgcccaacaacttccctttgctgatctgagccagactctgcttttatggcttacacccaaataattcaagttattttaaaaaaataataataaatcaagttattcatttatgagttatacagtcccatgtggggaaagggaaggagagtgaggtaatactcaattttactacctgctatgcatttataagtgagatacttctttttaaagtcatatttttggattagaacaaactctggtatatttaagtaaattccctgaagaatgtgaacaccgtaagcaggtgagtgcattattctctgcttcccctccacagagctgtggttcactctcctccatcctgccccctgcactgggggcaccacagagacagcacggcctgtgctcctgcaccacctgcttctgcttgggtgtggatgataacaggcacctgcaggagatgggagcgtggggggagaagtaactcagggttttcacttccctcactccctttggacagctctgcggttctgtaatcattgccgtcctctacctacagccacaggcctgcggggctgcccctagtgaaagctacagatttccgtgagttctggaaactgctccctcttccttgttctttcaactcagagatggaaacagtttcctgccactgatcatcccagggagcttcagcaccccttgtggctttcttaggcctgccagcacctctgtaatgtgtgtcttctttctttgtcatctctttcctgccaggaccctgactgtcccacagaagaagtgacaagaatttatttatgacatgacaataacacatgtattcatggtgttaattcgatttgtttcatagagacagcgtcttgctatgttgcccaggctggtcttcaactcctggcctcaagcaatccccctgacttggccttccaaagtgctagcattacaggtgtgagccattgtgcccagcccttaacttgaaaatctgacagtataataaaagaaaaaaatagaagtattctggaaatggaagaggaaagaaggctaaggtggaaatcatcaatctgtgtcatctgagaagccccacgtgcagaggctgtcccgggactttaggggagaacaaaaacaaagcacccaggatcctggtgtcagggacagagcatggccacggcggaatggtagtggctctcctatgaaataatgctcataaacatcccttgtgagaaggatcagatcaacatataaaaatatgccaaataaagtgaaactcaaggcaggagtgggactggccattctcagcccgcgacctccatggacttggagaaaggctcagcctggagatgtgtgaggcctccgacctggagcagcacccgcccctaaagaccaggcacaaatcccagcacatggagggatccagacaaatacacaagagatgaccacagcaggagctttactgagcacagagcgaggccgcacaccactcagctcctgcccctccacctgcccttctctccccacctgcccctgccccagcacagcagatcctcagaatccaaaaagagaacctaacttccatgttttattaatggcttataatattttatcacatcttcagaaaacactatgcagaagataactgtagagcaagacatctatttagggtgagtgagtcacagtggagatctgggagggagaccctgtaaccctttcattccaagaaaagaaaggtcgatccaaagaaggggaccccaggcctggatattgggattacatgaaaggggttctggggcatcaggggaatgggtccctctccctacatcctcccggggctgtgcttgggaggacagcagctgggggaagaaaagtcggggtccacagagatataagggggctgagaactatctgtgtcttgcttcttgctggtctgcacaaggcagctctcaaactgtggagaacatggtaatgaccagatcccgctcagccgctctcagcctttacacctagagcattatgggcagcccatcaccatcccctaccttcaaatccaaagatccgtacagcccaaagctgctccctggcctcaactcctgttggcatcaggccccaaggaagctgtgagcacgtctgcctgggaccctgtcaccatctggagaatgacaataaaggggacccagcagcctgcaggaggctgtatttgaggcaggaccatgggatgggtgaggcacaggactgtggctccatcctctctatttgaggagttagagatgagctgcctctgccaccccttccatggtgatatttctagagtacacccctgtgctgaaattcttatgaggaaagagacctgatgagatgctatggtgaagaggggccataagggtcttgaataccaagttaattttgctaccagctgagattaggaagtgaagcccaggacccaggagaggaggaggaggagataacacaggaccctgtgatcactctcctggccatctgtgtacagtgagacgcttcccttcggggttgggagcacccagtgtcatggtcctgagtgttgctaccctgctgttctcatctgtgaatgcagccagaccactttcttcctctgatataaataacttggaggatctgtcaccagacacctcatatctacatattaataaattctgtacggtggtttggcttaatgttttatatgttataagaaataagcaaaacatagggatgatatttttagtaaaggtatttcagggtatatgagaatcagattcctagggccctgtgtacctcatcttgctgtttaaagtcctcatggaggatcagtggagtgcagagcccagaaatcatcctgaaggctgaagctccctggtgaaaaggaccctctcctgcaccctggggctcagagggaacaacaaagctccctcccagggtctccagcctctggcctatactgtcagcctgcactttgttggccttcctggctgctaatattccagttcccagcagcctcctctctcacccttcacctcttctgactgggtgcgaatggtaactagaccaggcagtgccctccttgtcagtctgcctgtctgcctggttccctctcagagtttgtgtcttcactcggttcatcatccccagccccagcaggaacagggagaagtgacttggcaaatgccccactcaaaatgggatccctcaaccagagaccacttgtgaaagtcagttttccctgactaaagaaacaggacatttaccctgttagaagttgatgtctgccagagacctccacctgggaaatgctggttcatggcagggtctctcttttagtaaagggaaaaattcctggctaattgatagctaataagtcatttagaatccagttcatgtaaaaggattacctacttaaaggattaactccattataataaggacacacatcccacaccgcacatccaatgtcatttgtgagattgctttgattcgctcatgtagaatgttactctgctgctttgcagagaggcttgccacacatttcaaatctctgctcctcatttcacaccatctggctcatgaggtgaaggtgatgagaagtgtcttcagacaatactccgaggtttgtctatcagagtcatagtcatatattacatatagagattattttcttagaagttgtaatttattgatatgtattttactcatggcatagatagatactatccaacaattcgtttttattacctctacattacactgcttaggtagccactactggtacctctgcattttctttcttgtatgtgacattaatgtataagattgtatgtacatggtggcttggtttccaggaattgctgattaggtaatttagaccattccttccactgagtacaatgggaaaaggaggaaaacatacatatttgaaaaatctggttgagcaaatggatgggctaacaaagcagtgaagatttgcctggccaggaaccaggagaggggagaaatccagaagagcaacttgagctgtggggctgcttttgtggatcagaggcagtaacacctgctccctggccagaagccaacttccaggattcaggactcagaattcagaacttagacggtcccttggtctctctagaattcagtgctcatttagaccgggctaagaccctcacactcaatggctggaggatccaagcttatggcatgactgcctctggagcatttcatgctagagagatcccaacaggtgtaggtaaatggtctagagggtactagccgggcttccatggaactctgtgtaaggcacttccctgtgttgttactcatgttggccatgtcctcgggaatttagtggaacggccatgtcgtcttgagtggaagtgaggacggtgaggtggtccctgggcagtcagagattttgtgtccctgcgtcctttccttccatctcaaccagagaccacttgtgaaagcccaagaacaaatgtcattaaatgtctgaggcgaatccaagaccaccgatccattgcgcccaggagccttgggccatgtagcccagcagtagtgaggtctgtgaggccttggtcacccccaaagtgttgccccaagaggagctgccgctcgttgccatcaggcacctcaggagctggacatggtattcattataatttctgatgaggaactagagaggtctcatagcatatagaccttgatcaaattgggtcatggtggagtcaggcaaaactctgcaatgactcacaggtacctaagtataaaacaaagtctcaactcagagcatccatcagagcttcaggctcagtagtcattcctttatgctgttgctgtgtttgtactgtgataactggtgcttgaagggaggacatatagttacatgttgcgggaaaacacatgtcattagaaaacttggcatgatttagggaccattgccttttccatggtagatgtgggactctctgtcatcttcaccctgttgttccaagtgcagaagagagagcttcttcctgctttcagctgcgtgactgacaacggaagctggaattcagagaatcagtggcagcctctgtctctccaggccccaaccctgcaggtttaaggaatggacttaggtctctggcactttgttctcaacacacattttccttcactcattcagaaaaaaaataataataatagaaaatgaaccaaaggctgcaattctcatggcacctagagaactggagtacggaccaaggttgccacatgcctgtcattgctccaccacactcggttgccgtgtgacctcgggagaagctctctaccactagggacttttaaactcatctgtgaatcctggataaacacagacattccggtaaccttactgaaatgaagtgaggaccaatgagttgacaggtggagaaaatttttttttttttttttttgagacagagtcttgctctgtcacccaggctggagtgcagtggagcgatttcggctcactgaaagctccacctcctgggttcatgccattctcctgcctcagcctaccgagtagctgggactacaggcgctcaccaccacactcggctaattttttgtatttttagtggagacggggtttcaccatgttagccaggatggtctcgatctcctgacctcgtgatccgcccgccttggcctcccaaagtgctgggattacaagcgtgagcctccgcgcccggccgcagaaacagaaaaatttaggtgatggcctttactcctagacagggcttttttaggaacatgcaccttaaaagtaggaggaaaacataatgccagcaacaccctgcctaaaagcccctttagtgatgataattatcattcatctttctataaaagcacagcaagactttctacctcaatatctcaaatcagttaaatatatcttctgatcatataccagtgtggacccacatgttttgctccaagtgaaaatgaaaaggaatgagaacatctccacctttgtgtggtgaccatgggaccacggaggcttggaagccagcctacatctgcccaaactctacatcacctgccattgtcaattttcaatctatccgttctatgctttggaatcctacataattcatactcttgaaaaatctcattttcatatgtagggcagggtagaaaaggtgatatctctgttttaatttgctaagacttccataataaagtggcacagactgggtaagttaaacagtagaaatgtattatctcccagttctggaggctacaggtccacgatggaatgtattgcagggctgactgctcctgaggcctgtctctggcttacagatggccatcttctccctctatcttgtcaacattggcctcaaaatatgtgtacagggacacagtttagcccataagagtctgcgccatccttggcggtgcatattataagaaataaaagagaatacaaccctttggctggactctgttgatattttgaaatgttggtcttgcaataagaacaccaccaaaggccaggcgcagtggctcacgcctgtaatcccagcactttaggaggccgaggcgggcggatcacgaggtcaggagatcgagactaccctggctaacacggtgaaaccccttctctactaaaaatacaaaaagaaaaattagccaggcgtggtggtgggtgcctgtagtcccagctgctccggaggctgaggcgggagaatggtgtgaacccaggaggcagagcttgcagtgagccaagatctcgccactgcactccagcctgggcaacagaccaagactccatctcaaaaaaaaaaaaaaaaaaaaaaaaagaacactaccaaaacaagggagccgaagtttagttttccctggaaagtgagcactccctgagcctggccgccccagggcagcaagacccagtgctatgtagttctccaaagtcctatttactttagtgattctgattctgtatttttaactgggaaaaggattctctttcaggaaagcaaccacttctgatgctatttaggtattattctccttatacttataggagaaaaaattgatgttaatgaacaggaaatatttgccaaattatcacacaaataatttttgtatcattttaaaatactccttattgtactgagcttgttggtattttaataaaaattattggcacataatatttatacatactttggggtacacataatattttcatgcatgtgtagaatgtgaaatgattgagtcaggatatttaggatactcatcacctcaagcatttatcagttatttgtgttgggtgaatttcaaatccactcttatagctattgtgaaatacacaatacattgttgttaactacagccagcctgctgtgctatcgaatattagaatttattcctcctatttaactgtatctttgtacccattaagctacctcgttttatctcccagatcccccacacacccttcccagcttctggtaactattattctgctctccacctccataagatcaactttttttcagtcctcacatgtgagtgagaacatgtgatatttgtctttctttgcctggtctatttcacttaacatactgacctccagttccatccatgttgctgctagttattatgaggtagttctagctggaagaatagagaattaaaagaaatctttgtgaagcccctacccaggtttgtcaatttgtaacattttaatattattggctatatgtagtatacatagaaaataatagaaatatatgcagatagccctgattctccacagttctgttatgtatgtgtttccactgaaacacatacagtacagtactctatgtactgtacagtactactgtactgagtactggactgccagtggggagaggcggatgtcttgaatttggtgaatgcctttatattgttacaaagtgtttttttttttttggttgtttgttttgagacggagtctcgctctgtcgtccaggctggagtgcagtggcgcgatctcggctcgctgcaagctccgcctcccgggttcacgccattctcctacctcagcctcccaagtagctgggactacaggagcccaccaccacgaccggctaatttttttgtatttttagtagagacggggtttcactgtgttagccagggtggtctcggtctcctgacctcgtgatccgcccgcctcagcctcccaatgtgctggcgtgagccaccgcgcccgggctacaaagttttttaaatcctttcgtttgacatgattttagactttgtaaaaattgttttttgttgaatgtatcattctgtggcttgctttatcgtttaatatggtctatgaggtgaacccacacacccatagaaacagttcatttgttttcagtgctggatagtatttatgagaggaatatcccacaatttatctcttctcctgtcagcgacctttagcttgtttctgttacagacactgccacaatgaacatcctgggtcatctctctctggtcccctgtgtgagttccccaagatacggatgtaggaatgggattactgtgcttttaccatgtgatgttataggatgtcaaattgttctctgaagaggttgtatcaactcccccctttaaaatcttctttgatattttacaggtcaagttatcttcctccccaactagctgctccgcctcagtcccccttcattggctccttttgctgtagatgctggagcactgtggggttttactgcctcccaatcactctagtgtcctccactcccaggattttaaatatcgtctagacacagatggctcccaaatatatatctctacatatttctataatcaaaaaactaatggtaccaaaacaggtactctgatatattgcagatgggcctgcaaactggaaatgttttcaggaaaggcagtacggcaatttctgtctaaattaaaaatgcatacacccagtagtcccacttctagaaatgtgtccaaaaatacacctgcattcctgaaaaatgactgtattcagaattatatgttgcaaccctgtttgtaaaatcaaaaaggaaagaagaaagaaaatgaaagataaaagaaaaaataatccaaatatctgtcactagcggactagttaaaaaagcattgcaagctgggcacagtagcattcacctgtgaatacactctactccactctgggtaacatgaggaggcctccctaccttcctaagaaaacccaaacaagcactgcatatctacacggcagagtctacaaacatttaacacaaaagaagaaagacataggaaactcttgatattccctcatgggatggtctccatgatacattgttaagaagaaataaagcaaggtgtagaataacatatagagtctgctaaaatttgtgtgaaaagggacaaagagatatatatacacatttatatttgcttgcatatgcataaaatatatttggaagaataagcaagaagatatccctggttgcctgttggggatgagacagggtaagaaagagacattttaccttttgaacattttgaattttgaattttgaactatatcaagaaataaaagataattcctagggcaaccaaataaaccccaaaaaaattcaaaatgaaaaaccttttaaaaactaatagaatttttttacctttattaaaataaattttaaaaattttctaaatattatattattcctttaacaaggaggtttaccgccattttaattcagtacgttgttttctttttaattgcatgatctttctttacatctatcttttttccattacaaggtaaaataacagcatgattaattaaatgcagtttgtttggtgaaggaaattttgttcaaatcttggtctaagtgggaaagggattctaggggatccagtgcagcagttatgggtttcagtatgctcacgacgccctctagtgtttgtgtgggctcatggatgccatatctagaaaacactggaattctcaagcacacgtgactgaagccatttgccaaatgttcaaggtcctattaatggcccatctgagtacttgtcatacgcggtcaccctatctttggatcagaaggtacactcagagctcctagtgtcacatcccaggcccaacctgctgagattagtcgaggaaggtctggaggtcagtgtcgtgaggggtgggaagactgagggtgtgggggccagttgtggagtggcgggagccccaggtgctgtatgaagccgagcctctggatcaccctgtgaccccacatttggtcccttcctgggtgtcttccattcccaggactcccaggaaataaaatgctgcaagattggggtggggagctgtccagggtgggtcaggtgtggtctcactgatcctacacctctgcctcccagcccactcccagccctcttctgatattagaaaccaacacagattgccttagggtggtggttctcaaagtgtggtcctgggggaagcagcattggcatcacctgggaacttagatatgcaatcttcagggcctggcctggacctactgtatcagaaactctgcatttaacaagcccccagcagaattctgcttttcaaatcagatctctctctctctctctctctctctctctctctgtttcaagtctcaatattgagtagctgtgacttctggatagtcaggtgtcagacaccctttcttgccaggaggcaccaggctcctcaatcagcttagtctcattcttggcctggcccagggaaagatgttcacttcctggattctgagcaaagctctcctatcctgggtgcctgtggggctcccacttacaccacaaaacaaagctcaaataatattttttcttttatgagatttttggtattccttcattagtcagagctgaagatctacatatatgtctaccaagcaagtgtgcatgtcccactagccagtttgttagtcttgccaatgcaccacaacgtagcagcctctcagtctctccttgtgaggtgttacctggagttctttgtctcaccaccaagagaattaaggagcgtggatacaaagggtgaggttggagcaaaagtttaataagcaaaagaagaaagctctcccccacggagagggggcttggaagatggttgccatttttacagctgaatgtaaaggcttttacaagaaactgatgagggctgggtgtctcatttgcataaggcacaaatttccggtagctccaccccatcctcctagtgcccatgcaggcgcttagcttgagttactccatattgctttgtttccctgactgcccatgtatcgggggacagaattttccattgcgggcatgtctggacaagtctcctgtgcagcctttcttatttgtgcagctgtgggcatgtcttaggcaagcccccctgtgcaagttcccttctctgtgcctgcaggccgttcttttgtttgaaataattcaactgaggacccaccataactgcccgcctgaccagtttcttccttttttctctctcaatttgtgttataatttccttactgatctctgcctgagcaagactgggcatgccttgagggcaaggagggtttatttcctcttacctcagtcccagctcctcttaaaacaacgccccgcgcacagtaggtatttgataaatgtttaccaaatgaagggattgcctgcagtggcttggcagacaggaaagcagaatgaaaacccacaggccaaaagtggctgggaaaagattttccaaatcctagtgctgggcacagggcccactgaaattcactttcggaaccttcccatctgtctcgttctcctctcatcaggatagagcccacctagtcacacactacctttcaggaccaccttccagatcagccaggtacaaatcccaccgacttcctgcctgtggctccaaatgctcagctgaaattctgaggctaatttcagtggagttagaggcttatcccttaggagtggcaatggctggctttaagattcgagaagtagtgtttacatctcaaaagagaagactgctccaccagaaatgcagagttttggtatatgcaggtccggggtcttcaggagataaagaatgatagctccaggagcgctgggacccccgtgcagccaccagtcaccacagcctaggcaggggttgggctctcacctcggcccctcctctgcacgccctggatgtggatggtccccgagtgtgaactcgcctgggctctgaccctgggtgctcttcccgccgttgtggagcctctgcgggtgtggtgcatgcacagggggcttcacaggagacccggggccctttagagtctcaaggtcaacattcttggagaatccatgtcaggcattcaggctctcagggactcagatgcccaaactatgaaaatgagggaatctatcccactctctcaggtgtggtgagattcctattatatgactatcggtcatctatacatggattgtactctcagagttgcctttatcagtcggccaatgcctaaaacccaaagatgggtcaggcatggtggaggaagagttcctttcttaccttctgaaggtgccatcaacaggaatttctaccctgtggagtctagaggagactttccttgaagctgagttgggaatggacatttggactttttttttttaagagttagtaactccgtggagaaccacacatttatttgcttactttaattctacagcaacattcgaggtggcttactgcaacaaacccagtgtaataaatacatacgaattactttaaaatcaacaccaaggaaaatatacattttaaaagattaaggctggggtaaagctggaacattactaggcgggaaggaacatctgaaacatttgctgaaatggagttgaccctttacctagccatagatttgttgcctcacaatttcattgcatctgagcaccagggaggggggtggcagttcaggtcaccagtcccttgtttcctgattcaggatcagtgtcctgttctacacttacagtcaaagcaaattacatcgttgtaagatgtttaatgatgaagtcaaagtccacagagtcagcaagtaagtgtaaaaacctcaggagtccaaggacagtctacgtttctccccagaaatggcttcactatgcactgttgaagggagagggtcctttcaaggggccccaagatgcaggagcaattgggctgcagctctaaataaagatgtcctttctacctgcagattccacaaaacctcacaggcaaatttggtgatctcacctgagctaggaattcgattttttgatattggttctctttgagccattgtgtgagctttaaaatgtgacatggagattttgctatactggtatttccttgctggaatttgacatccacagtggctctggcttccctgtctggtcccaggaggaaatggagtgtcctacactttttttcagcatcgctttgtgtaagaaggatcaggagacttggagtcaggggctcctccaatctcactctccttcataaaacagtgtcccttaagctttctgggggtgagggccttgacaccgtgctgttctgatgaatataattgtcccagctcccgaaataaaagcacaggtgcacaaaataccgactgttgcaagcaatgccaaggtggggatgtttcctaggtgccaggtttagcactttgactttgtatgtacacacacaggggccaggcgttgtggtttatgcccgtaatctcagcactttgggaggctgaggcatgagaattgcttgaagccagaagttcaagaccagcatgagtaacaaagcaagacccagtctctacaaaaaaaaaaaaaaaaaagaaaagaaaagaaaaaaatacacacacacacacacacacacacacacactgggtgtggtggctccactctgtagtcccagctactcgagaagctgaggtgggaggattgcctgaatccaggagttggagcctgcaatgagctgtgatcgggacactgctctagcttagtgagaccctgtctcaaaaacaaacaaacaaaacaaaacaaaatacatacacacacacagccagagccagcactgagggagaggctggtctcaggggtggggtcacaggcatttctcaggtccctctcagtggtctttgtctctttttcctggaggtggaggagtctgtacttcatgaggagaagtcctctgaagaaggcgggagatactcaggagcggggtccagagagggaaaaggatgaggaagtggagacaaagtggagggggcagggcaagaagggcacatgtgaggaatggggagggggaggaccttccagctgtcagaaaggtcccacgcagaatttggctcttggtttttctgctttatcaggatggatttgggaaaccagccagagtgggagataaggagtctactttgcaaaggacacgtgtgagtctcctcctagtttgaactcatgagtagcagctgacagccaggacccttgtgtggggcgcgtgacgcccctttgcaaccagggcgttttctgcaccccaccagccatccctcctgggaccacgctggttccctccaaccctaacagggagagaaggaaggagaggtctggaggctttgggtcctccctcgtgctccttcttcctctgccatttattccctgagtgtccttgactttcctccgctacccggaccccactacagcaaagcacatcctgcacactggcctggactccctttgtaaccacccagtgtgttcaccttgctgactgcctagacaaagccgatttatcaaggcaggggaattacaatagagaaagagtaattcatgcagagccggccgtgcgggagaccagagttttattactcaaatcagtctccccgaaaactctaatcagtttttaaggataatttggtggatgggggggccggtgaatcaggagtgctgattggttggctccggtatgaaatcatagtgagtggaggctgttctcttaggctgagtcagttcctgagtggggggccacaggactggttggcaggtccagatggggtcctccagttgttagaaatgcaaaaacctggcctggcgtggtggctcacgcctgtaatcccagcactttgggagcccgaggcgggcggatcacgaggtcaggagatcgagaccatccttgctaacacggtgaaaccccgtctctactaaaaatacaaaaaaattagccgggtatggtggcgggagcctgtagtcccagctactcagtaggctgaggaaggagaatggcgtgaacccgggaggcagagcttgcagtgagccgagatcgcgccactgcactccagcctgggcgacagagcgagactccgtctcaaaaaaaaaaaaaaaaaggaagaaaaagaaaaaagaaatgcaaaagacatctcaaaaggccgctctgaggttcacaatagtgatgttaccttcaagagtaactggggaagttgcaaatcttatgacctccggaataatggctggtaatattcagaattccagcccctctcatcctaacttaatggctggcggcgtttcattcgttttaaaagaacactttccctttaaactataaattccttcccaaggctagtacggcctatgcccagaaatgaacaagggcaggttagcggttagaaacaagatagggtgagttaggtttgatgtctttcactgtcatcatttccttacttataattttgcaaaggcggtttcaccttggcttcagccccacccatgcagtaacactgtgccctgtccttccaaccactgccactaggtgaaagcagagagagcatcgcccagatgggctagattctcacaggctcactgctagaacgaacattcttgagactttagatctaagtcagcctgatttctgaaagccttggaccgtttccaaaatcaaatcaatactccaggaacaagatctgcctcgactttgtctccacccaaggacgctatggcaacgcagttttcaaacgtgctttgagaataaatggaacagggtcccctgtgtccccactcatttgcgttttcctttttattacagccaaccgcttttgtaaatattgttacatatctctctattccactgaaaacatctctttcaaatgcactttaagaaagattcaatgacatgaaaatatgaaggatcctcttgaaagagtttctggtgctgggttttaaagaacgttttggtttttaaaactctgtaaccattttggtgtggggcttagcttcgtattttcaaattgaaatattctcttccttaacgtccgcataaatccaagttcacaatttttattattttaaaattttatttatttttgttttggggacagggtctcctcctgtcacccaggctggattgcaatggcacaatcatagctcactgcagcctggaactccctggctcaagcgatcctcctgcctccaattcccaaagagctgagattataggcatgaaccactgcaactcacccaaatccaagtttatactaaaagataaaattccaacatttcagagaaaatgaaagtcacaaagttatcccagtctctgaagtcactgtcaaaactttggtgaggaatcttccaggttttcccctacttaaaatatatattaatattatgtaagtaatattagcggcattttcacccaggctggagtgcagtggcacgatctcagctcactgcaacctccacctcccgggttcaagcaatcctcctgcctcagcctcccgagtagctgggactacaggcgccggccaccatgcctggctaatttttgtattttcagtggagacagggtttcaccatattgaccaggctgatctcgaactcctgacctcaggtgatctgcccaccttggccttccaaagttctgggattacaggcgtgagccactgggcccagcctccttaaccttttaaaaaaggttaaaagtatgctgggcacttcttttcatagcaatacttaaaagcgatcttactctttttaatgactgtatagaattttataatataactcttctttgggagacaattgaaatgttctttatcttcactgtggtagtggagatgtgggtgtgtacaacagctaaaattcaacaagttgaacactttaaatagatgcagtttattgcatgcaaagtatgtcccaatatgatgatttaaaaatattatcgtctttgagatttgtactttgcttatgtgaaacaaaacaaaacaaaaaccctgttcttgtgcccaggagacacaccctgactcatctggaggtagagggtcatgctgtctgcaacttaccctcacaggctctgaaataacaataatagcagtatatttacagattcagaaagagagaaagctatagtaaaaatgttcataagtaaaactagataaaggtcaaaaataaataataaaactacgtcttttaaattttatctctcctttactttttctctccccttttcttcctatctcttccctcctttcttaacacgttcccctatccttccctcctttcaccactctctgcacttgatccccggtgtattccagcccccaggccaacacacttcaccgcgtccgcctggggcaggtcagagaagggacgcgaggcggcgctgtcacagcattctatgcgccccagcgccctgggccgcgcaggtcttttatcatttcagtggtcactcccgtctttgacggggccacactcggggtgtaaattaggatcctcactgaagcggcgggaccctgagaggctttttcctggccccttagttgtgggttttcctgcgggcggtggagtccgtttccatcagaaccgcccagaggcgggcgctgccttccaggggtgaagcgttttcggaccctggaatctgtgggcggcctgcgggaggggctgaggcgcagttccctactcactcagatccgaatccaccgcggtgctgtttccagcgagtcagattccagatcgcgctccagcctggactcggaattcctgccccgcgggtctgcattttcacagcggcaggtgtgagtgccgcgcagctggagaccagaagcctgaggcagctcggccctccccagcccaaagtgccgttattccgtttctgtatcagtaaacacgtttcatttttcggagaccagggaagggtgatgggtgatcccagtcctcgcagtgaattccgggccacaaaattcaaaacgcttgctggcaaagccgtgcgcggtggctcaagcctgtaattccagcactttgggaggccgaggcgggcggatcacctgaggtcgggatttccagaccagcctgaccaacatagagaaaccccgcctctactaaaaatacaaaattagccgggggtggcgcatgcctgtaatcccagctagtcgggaggctgaggcaggagactcacttgaacccgggaggcggaggttgctgtgagccgagatcgcgccactgcactccagcctgggcaacaagagcgaaactccgtttcaaaaaaaaacaaaaaacaaaaagctttcgggcgccgagggcagccccgccctgaattttgtgagcgcccgcgctgggccgtttctctttcttttccggaccctgcagtggcgcctaaagtctgcgaggaggaagtcgcctctgtgctcgtgagtccagggatctaaggcaagtgctgagggagaaaacatagttgatggggcagagcagagggggctggaggtggggtggagggggagggctttgaacagaagacctgggaggcttggtgggggaggggacccaggcctcggcgctgagaagcaactcccctggagctcaagaccttcttggcctcccctagcccaggggaggactggcttcatgtctccctgaaaccgcttctaaatgccttagaacaaaccttaaatattcattattattattgaactattaaaagtcttttttggaggcgagctgaatgagaccctttgctggagctggcacacggaggaagtcctggagggagggtagacaccgtggagggaagggcttgggacctgtgtcaggagagctgggtccatctccctctctgtctcaaactatgcttatgatctttagcagtgaaaataatctctctaaggtggggacaggaccccagtccctgctgtgcttaataaattatgaggatcaaaataaattatcagtgaatgtgtatgggaagactaagaaattgttaaagttctcgaatacattacattttcatccacagaaaagtgtaggctagggatgataggggaatagttagtaatgacagggatagttgaacttaaaaaaaaaggttgtgaggccaacaaaaaagaaatggacacagttcctgatcctggagggttcatagtctaatgggagaggagggtagaagatggtaggtgatggctgggtgtgtggcactcgcctcgcctgtagtcccagctactcaagaggctgtggtgggaggactgcttgagcccaggcatttgaggctgcagtgagctataatcacgccactgcattccaactgagtgacacagcaagactcctctcttaaaaaaataaaataaaataaatgaaaaaaataagattcaagacagggcacagtcggtaccatcaggaaggttcaaaccatgggctagatcagtagttctaaaacttgactacacatcggaatcacgcagggaactttaaaagatactaaggtttaggtccaacctaggtttactgatttaactggttgtggctgtggcctgggaacatggatattaaaaactctccaggtggttctacgcagtggctaggtttgaagaccactgcctagatgtcccaatgactaagaatgtgcgctggggacaagccaattctcttagtagaggctttccagacagaattcttattattgagaattgagaattcatatgccacacataatttatcgttttaaagtgtacagatcagtggcttctagcataatcacaaggttgtgccaccgtcaccactatctacttgggaagattttcttcctttttttctttttttttttttttgaggcggagccttgctctgttgcccaggctggagtgcagtggcgcaatctcagctcactgcaagctccgcctcccgggttgaccccattctcctgcctcagccttctgagcagctgggactacaggtacccgccaccacgcccagctaagttttttgtatttttagtagagacggggtttcactgtgttagcaggatgctctccatctcctgacctcgtgatctgcccacctcgacctcccaaagtgctgggattacaggcgtgagccaccgtgcccggaccctttttccttttttttttttttaaaggctagtcaagtgaaacagtgggagtgaagatgaaacaaaaacatctataactggttgtgatcaattagttgtaaacaccactgcactcagaccagcctaattgggaagattttgaggatatgctgtggtctgatgggttccaaggcagaggtgacagtaacctggaagagggagactgcttaggcagtggcatcctggtgggatagggtgaggagatcccagagcccacgtttactgcaaccctggggaaatgtcaccagagaaatgggggtggtgccagacaatagattgtgggagctatggtttccatggtagagtagaagcatctaccatgtgtgacattcagcagatggggcgctgtgggtggcttggagcactctggttgtaactgaggcaggcacagtgtttaggaagcctgtgcagtaatccagactgaagggaggggaaagcctagactaagactatggctgtgggattgaaatagcgttgaaggagctgactttgactcccggagatgaaggggaaagaggaaatcagaagggaccaaggatggtgaagttcttaagagaaactgaggaggaagagaggatgatgtggtgggagacgtgtagagagtccttgtagatctgtcacattgaaggggactatggtcccagaggtacagatgtcctaaaacaggctggaaaagggagtctggagagagcttggtgttgtaatgaaccatggggagccgcctcgttggccctgtgattacccaggaactgaatagagagggggccctgggagacctcagacacttagaggatataagggggtgaaaggggggacctggctttgagtcgaagggaggagaaggagattatatagctgaaacgtctaagagaatttgtgatctgagcgtttctactggggcaagtgcttctgaaaggcagaggcggctgagatctggaaacaggtctgcaaatctggtcactggtctcattgcagtaacgctgtgcgcggttgagggagtgtattggcagaaaaaccacgcgttgtctgtcccggaaggaacaagccagtgagagccggcctgatgggaggaccgccgaaaggggcttggtgaagcccgcgctccttgggggtgggaatgcggggatggggtggtcgcgatgcagggagggcgacagggtccaggtcgtgctcataagtttggagctgtactctcagctactcggggctggtccttgattttggctgcgctcgcgcacgctcccccttttctggccgccaggtcccgccttctaaatttccccaggtctccaggccgctagaattttctcttctgaacgtggccccgccctctccactcatgattggccaagttccgggcctcagttttcactggataagcggtcgctgagcggggcgcaggtgactaaatttcgacggggtcttctcaccggtttcattcagttggccactgctgagcagctgagaaggtggcgacgtaggggccatggggctgggccgggtcctgctgtttctggccgtcgccttcccttttgcacccccggcagccgccgctggtgagtggggttcctggcggtccccggcggagcgggagcggcggggcgtttccgggggtccgggtgggttgccgcgagcgctgtgcggtcagggcggggctcaggtgtgctgtctggagtgcagggagctggacgccgcctgttcccgccacacctcagccctgctttcccatctcccgtctcttttttttttttttttttttttctttctgagacggagtctctgtcgcctaggctgtagtgcagtggcgcgatattggctcactgcaagctccgcctcccgggttcacgccattctcctgcctcagcctccctagtagctgggactacaggcgcccgccaccacgcccggctaattttttgtgtttttagtagagatggggtttcaccgtgttagtcaggatggtctcgatctcctgacctcgtgatccgcccgcctcggcctcccaaagtgctgggattacaggcgtgagccaccgcgcccgacctcccgtctcctttcagtcctcctcgggatcgcgcatcacccgcattttctggtctcctcctgcacttgctctcctcgcctctcctccgtctcctctcacttttcggacaaaccagtccttctgaggcccctgggttcccgggctgctcctgtgaatggcattggaaggccgttccagcgcggccgctgaggcagccacttcccccggtgctgggggcggatctcaggtccctgaagtcctgtcctctcccggagccgatgtgttctcagctcctgggccgcagctcctggagttggggccctcctttcttgggacccggaggtggtgcttcttgctactgtgaggactgtggggggtcctgactctcaagctgaggggttggagtctgcaggctccgggcagaggattcttcctgcgacttctgtcatccccagctcattctcccctcgcctccggctccgggggtcctctcctctctcgcatcccacccctactaatgaccaatgatctaaggacaccagattccctctcacctcctccctgcccatcttacggcgccctgggtccttttgctctcccagctccctgctaccccttcctgtgtgctgttctctgatccatttctagagtgtcctctgccttcatcccccgcccccgccactgaaggtccctcctgcctcctttatgggcctttcctgcaagcagccttcactccgtgctgcccctatgcctccccattcccaaatgtccctgactctaactttctggtgctgccttttgtccgggggggtcttccctccatcccactcccctccagacccctaaggagagccctgatgctaatggcagttgggccttaggcagggcgcagggcagcgcagatgccccctcccctccagtgcaggtgcctgctctgggccctgcctcattgtggccccttccccactccttcatcctcagcctcaccctcttgaggaccccaccctccagcccacaggtgctggaccatccctccctggtccctccgcccctctccaccttgggaccttgtgctgctcctatctcttgcccagctgcctggggccctcagcaagttctcatctttcagtgggaaagtgggagtgctggagcatatgacagtgctgagaatctttcccaagccccaccctcccccagagcaccctcccctcctgtcctcaccctaccccaagttctcccacagtcactcctgccccatgctcatgccgccctccagttcttgctctgcccatctcccctccccaacccagacctaaaacaggctgttgggccagctgttccttgaccttccttcttttcttttggttccttgaccccagtgggctctcactccccacaccgcatatctaaaatctgttttgcctgctcttggggtgccactgctccccctccagcattactccttttggcaggtccttcctcaggctgagaatctccccctctaccttggttttctctctctggccagcacccccactccttgctttgtttttaatttttaacttttgtttgggtacgtagtagatatgtatgtatatatttatggggtacatgggatattttgacacaggcctacaatatgtcataatcacatcagggtaaatgggttatctatcacaacaagcatttatcctttctttgtgctacaaacaatcccattatgctctttcagttatttttaaatgtacaataaattattgttggctgtactcaccctgctgtgctatctactagatcttattcattctaactatatttttgtacccattaaccatccgcactcccccactccccactacccttctcagcctctggtaatcgtcattctattgtctctccccatgaggtccattgttttaatttttggctgccacaaataagtgagaacatgcgaagtttgtctctctgggcctggggcttatttcacttcacatgatgacctccagttctttgcaaatgacatggtggctgaatagtactccacatacacgtgtgcaccacattttctttctccattcgtctgttgatggacacttaggtcgcttgcagatcttggctattttgaatagtgctgcaataaacatggaaaagtagatagctctttaatataccgatttcctttcttttgggtatatgcctaacagtgggagtgctggagcatatgacagctctattatatttttagtttttggaagaacctccacattatttcccacagtggttatactagtttacgttcccaccaacagtgtacaagggttctcttttgctacatcctcgccaggattccttattgcctgtcttctggataaaagccagtttatctggggtgggatgatatctcgtaggagttttgatttgccttcatctgatgacgaatgatgttgagcaccttttgatatacctgtttgccatttgtatgtcttcttttgagaaatgactattcagatcttttgctcatttttaagttggattattagatatttttcctatagagttgtttgagatccttatatgttttggttactaatcctttgtcagatgaatagtttgaaaatattttctcccattcttggatggtctcttcactttgtttattgtttcctttgctgtgcagaagctttttaacttgatatgatcccatttatgcatttttactttggttgcctgtgcttgtggggtattacttaaaaaatctttgccagtccaatatcttagagagtttccccaatgttttcttttatagttttcatagtttgaggtcatagatttacatctttaatcctttttgattggatttttatatgtggtgagagatagggtccagtttcattcttctgcataaggatatctagtttccccagcaccatttattgaagagactctcctttgccctgtatgtgttcttggtaactttgttagaaataacttcactgtagatatatggatttgtttctgggttctctattctgtttcattggtccgtgtgtctgtttttatgccactaccgtgctgttttgattactctagctctgtagtataatttgaagtcagataatgtgattcctctagttttgttctttttgttcagggtagctttatctattctgggttttttgtgattccatatacattttaggattgtttttctatttctgtgaagaatgtcattggtgttttgatagcaattgcattgaatttgtagattgctttgggtaggatggatattttaacaaaattgattcttccggctgggcacggtggctcactcctgtaatcccagcactttgggaggccgagtcaggtggatcacttgagatcaggagttcaagaccagcctgatcaacatggagaaaccccgcctctactaaaaatacaaaattagccaggcgtggtggcatatgcctgtaatcccagctactcaggaaagctgaggcaggagaatcgcttgaacccaggaggcagaggttgtggtgagctgagattgcaccattgcactccagcctgggcaacaggagcaaaactccatctcagaaaataaaaataaacattgattcttccagtccatgaacatggaatgccttttccattttttgtgtcctcttcaatgttttgcatcagtgctttatagtttttattggagagatctttcacttcttcagttaagtctattcctaggtattttattttatttgtagctaatgaaaatgggattcgtttcttgatttctttttcagattatttgctgttagcacatagaaatgctattgatttttgcatgttgattttgtatcctgcaactttactgaatttgttcttcagttctaatagttttttggtggagtctttaggttttccaaatatcagaccacatgatgtgcaaacaaggataatttgacttcttcttttccaattttgatgccctttatttccttctcctgtcagattgctctagctaggacttgcagtattgtgttgcataactgtagtgaaagtagtcatccttgtcttgttccagatcttaaagaaaaggctttcagttttcccccattcagtatgttactagctgtgagttgtcatatatggcttttattatattgaggtctgttccttgtatactcagtttttttagagtttttatcatgaagggatgttaaacttatcaaatgctttttcagtatcaattgaaatggtgatatggcttttgtcctttattctgttgatacgatgtattacattgattgatttgtgtatgcatacctggaatacattccacttggtcatgaagaatgatctttttaatatactgttgaatgtggtttgctagtatttcattgatgatatttgcctcaatgttcatcagggatataggcctgtagttttctttttttgatgtgtctttgcctgattttgatatcaggatattcctggctttgtaaaatgagtttggaagtattccctcctcctctgtttttcagaacaatttgaataggactgatatttcttgttctttaaacgtttaattgtggtaaattatacattacataaattttactgttttaaccgcttttaagtgtatactcggtggcattagatacattcacatttttgtgcaacccaaaactctgtacccattaatcggtaactccccattcctccctacctctggcccctggtaaccatcattctactttttgtttctatgaatttgaccactctaggtacctcatttaagtagaatcgtgtaatgtttgtctttttgattctggcttatttcacttataatatttcgaggttcatccaggttgtagtatgggtcagattttcattccttttaatgatgaataatactcattatatgtatgtaccacaccttggttatccattcctcagacaatggacacttgggttacttctaccttttggatattggcaaatatttcatttctcttgggtatatatttatttcttttgagtatttcttttgggtatatatccagaaatagaattgttggatcatacggtatttcattttttaatttttagaggaatcaccatagtgttttccattgcaggcgtgccattttgtatttctagaagcagtatacaggggcttcagtttctctacctccttgccaaacttgctgtttgtgtgtgtgtgtgtgtgtgtgtgtgtgtgtgtgtgtgtgtgtgtgataatagccaccctgattggtttgaagtggtatctcattgtggtttggatttgcattttcctaatgagtactgatattgagcatcttttcatgtgtttattgatcatttgtatattttctttgaagaattggccattgaagtcttgcccatttttctcccccacatagcttctcatggctattttgcccatttttgagtgggttgactgttttgttgtttttgtcaaacttttttgcatattctggaaactaatctctctctttttcttttttttttttttttttttttttgagatggagtcttgctctgttgcccaggctggagtgcagtggcacgatctcagctcactgcaagctccacccgctagcttcatgccattctcccacctcagcctccctagtagctgggactacaggcgcccgccaccacacccggctaattttttgtatttttagtagagatagggtttcaccatgttagccaggatggtctcaatctcctgacctggtgatacacccgcctcggcctcccaaagtgctggaattacaggcttgagccaccacgcctggccttctggaagctaatctcttatcagatatatgacttgcaatatttatttcatttcaggggttgattgctttctcactctgattgtgccctttgatgcacagatattttgaatttttcatgagtccagtttgtcagttctttctattctatctgtgctttggcgtcatatccatgaaagcactgtcaaaccctatgtcatgaacattatacccaatgtttttttctaagatatttttatgttttagttcttgagtttagagtttaggtctttgattcattttgagttaatttttgtatatagtacaaattaagggtccaattttatattatttgaacatccagttcccccagcactatttgctgaaaagatggacttactctttgataccctgtcacctgcccaccccagtggacactagctggtccatccaattgctgtcctggggccttgtcatgccactcttccactttgaacccaagcccacatcattgctcccctctgggatactgaccccactataaacttctctagggctacaaccttcctaccccttgtgcctcatgaccaccccctcccttgtccccaccatgcccatgatgagtcttttctcaaggcagctcgccttgcctccatctcaccctcacctgtgcaccacagccacactggacatgggtccctctgagcctgagtcccttcccattcccactgtcccctctggcaagaccttccttccaacactgccttcatgctcctcccttgcccctgcagggcagcctctccccttggcccctattcccttagggggcttgtggccacccagtcctggcacctgacctacaagtttgccatcttcattcccccttcttctgttcatcagccccctcctctatcctcccaccctcacagttttccttgtatatgaaatcttcgttcttgtccttttgcccatgtgcatttcctgcctcctcagggaggtcgggacagcagacctgtgtgttaaacatcaatgtgaagttatttccaggaagaagtttcacctgtgatttcctcttccccagagccccacagtcttcgttacaacctcatggtgctgtcccaggatggatctgtgcagtcagggtttctcgctgagggacatctggatggtcagcccttcctgcgctatgacaggcagaaacgcagggcaaagccccagggacagtgggcagaagatgtcctgggagctgagacctgggacacagagaccgaggacttgacagagaatgggcaagacctcaggaggaccctgactcatatcaaggaccagaaaggaggtgagagtcggcaggggcaagagtaatgggaggccttctccaggaaagttggagacagagagcagggacctgtctcttcccgctggatctggctgggggtggggatgaggaatagggtcagggaggctcagcagggtggtgagccggaactcagcccacacagggaggcatggaggagggccagggaggggtcgccgctgggctgagttcctcacttgggtggaaaggtgatgggttcgggaatggagaagtcactgctgggtgggggcaggcttgcattccctccaggagattagggtctgtgagatccatgaagacagcagcaccaggggctcccggcatttctactacaatggggagctcttcctctcccaaaacctggagactcaagaatcgacagtgccccagtcctccagagctcagaccttggctatgaacgtcacaaatttctggaaggaagatgccatgaagaccaagacacactatcgcgctatgcaggcagactgcctgcagaaactacagcgatatctgaaatccggggtggccatcaggagaacaggtaccgaccctggccaggggctctactgttcccgcaattctgctagagttgcctcgcctcccagctctgtccagggaaaccctccctgtgctatggatgcaggcgtttcctgttggcatattgtgtcctgatttgcctctcctgttagagccattggataaagacagtgggtctgggactgaactgtccagtgttgtaatctgggaaagcagtgggccctctgacagaagcctgagcctggggtgggagttaggcaggagaggaagccctcagggccagggctgccccctctgcctcccggcctgcccatcccggagagttccctcctggccccatgacccaggagtccacccttgacatccccctcctcagcatcaatgtggggatcccagagcctgaggccacagtcccaaggcccatcctcctgctagcctggaggaattaggccccagggtgaggacagacttacagaaggtctgggatctgtgagggattcagccagagtgagaacagtggagaggagcagccctgttccctgcatctcccttagaggggagcagggcttcactggctctgccctttcttctccagtgccccccatggtgaatgtcacctgcagcgaggtctcagagggcaacatcaccgtgacatgcagggcttccagcttctatccccggaatatcacactgacctggcgtcaggatggggtatctttgagccacaacacccagcagtggggggatgtcctgcctgatgggaatggaacctaccagacctgggtggccaccaggattcgccaaggagaggagcagaggttcacctgctacatggaacacagcgggaatcacggcactcaccctgtgccctctggtgagcctggggtgaccctggagagggtcaggccagggtaggaacagcagggacggctgtggctctctgcccagtgtataacaagtccctttttttcagggaaggcgctggtgcttcagagtcaacggacagactttccatatgtttctgctgctatgccatgttttgttattattattattctctgtgtcccttgttgcaagaagaaaacatcagcggcagagggtccaggtgagaaaaggggacagtttctggagatgggaaagctcctttctaggcagtagggtctcctcattgctcctgcccagacaagacgtaggtgacaaggctgctggaacaggggatggaagctggggtatttgggaggggaatgggagctgcatctccatctacacccataagtgcttctcaagccagggctggggcaaggccttcgaatatccagctgtggcctcctcctgctgcaagtgaggagtgggcagcagggagggctgtggcacctgctctgtccccatcccagcctctctgtctctcgggctcactagggtgcgtccaggtggggtgagttgggaatcacgtgctgattgctgagggcctggatgatcatggtgtcagagggaggaaatagtaaaggtggctgtgatctggggagggccagaaactggagaggaatccaaggagaggcggtgcccacccgtgtgcctcctccaggaggcactttccaggttcccaccacctggcctccctgagtttccttgcagatgacacagatgaatagataagcagatgtccctgggccatttgaggagcggggcccagcccctcatcagggcagttgtggtccctgttttcatcctacctccagcgtgttttcttctgcagtccctgagggacacagtccccaggcgccatctctttgaggctttgttctgtgctctgtggccttaccttgccctccctgagccaatttccctttctcaaggtggtcactgcctggtaagtttggagtaagggacggtcagaagcatttcccccacagtcaggttgtttgatgggggatgaaaagagacagcagaagttttgtgtttctgcaaaaacagaggcagtgcaggggacagtgagaggctggggtgtccaggagacctgagtctggcggtaggggcgctggtttctcatccttgaacctaattgcactgtcagtcggcccctcatgcctgagcagatgggaaggttcgtcccctgccctgcagcaagagggccctgtccaggaggcacccacagcaggggcagtgcaggtctgtggtcactcctgctctcacctgcggcgtctcccgtggagggattgtcacttctggttccctgtgggcaggaatggtttcctcgtaggtcactggggttttggccaggaaaagggtatgaaattcatgtgccagtttatcaaaattcctgctttcaatgttgatgtccaataaagatgttcgtaatttcagctctataatcttaataggatttcctctaatactgctgttgtaaagcatattaaataaaacaggaactcaaatttggagccccctctccagaagggtctgtgtggagatggtggctgtggcagcggcagttcccaggtgcagagggtgggcagaggcagcctcaggctaaggggtctcccctactccacgtggagaaaagtccttgtaggttgcaagggcagtggcctgggtggaatccctgctagggacagagcaggaaggcctcgcagcctcaccaagcagcagccctggggtgaagtaagtggaccaggagtaagtggaccaggcaggagcagtagtgactcaacagcaggtcacaggcctaggtgggtgctgaaggtcatgggaggccaggcctcctcgagcaaggtggggggtcccagggtcatgtcaggtgcagatcctgtggcagccatgtctttccatgctgggcctgctgggccccccaggcttcctgatggggtccccagttaggagctgcctgctcagggctgggaggggaggagtgctgagctgcagatagagggcagggcccacagtgggcagggcctgccctggtgtgcaggtgcctctgcaggagaggagggcctggggactgagagcaagggtcagggcctctctttggggaggcctctcactgtaacaggactggtcaggcctgagaggagggcactgggttccctcttgggtcttgtccttttgtcttggggccctttcactccctgcacggtgagtggtgggcacaggacaggggctgatgttgatggagtgatgggagagaactgacaggggctgggaaaagcaaggagggaggaagaaaaaagtgggggcctcatcttctctcagagaaagggtgaatctgattttggggcaactgaagagagaaaagtccttagggaataaacacaacactgcacccagtggagcatttacccgtttccctcttctccagagcttgtgagcctgcaggtcctggatcaacacccagttgggacaggagaccacagggatgcagcacagctgggatttcagcctctgatgtcagctactgggtccactggttccactgagggcgcctagactctacagccaggcggccaggattcaactccctgcctggatctcaccagcactttccctctgtttcctgacctatgaaacagaaaataacatcacttatttattgttgttggatgctgcaaagtgttagtaggtatgaggtgtttgctgctctgccacgtagagagccagcaaagggatcatgaccaactcaacattccattggaggctatatgatcaaacagcaaattgtttatcatgaatgcaggatgtgggcaaactcacgactgctcctgccaacagaaggtttgctgagggcattcactccatggtgctcattggagttatctactgggtcatctagagcctattgtttgaggaatgcagtcttacaagcctactctggacccagcagctgactccttcttccacccctcttcttgctatctcctataccaataaatacgaagggctgtggaagatcagagcccttgttcacgagaagcaagaagccccctgaccccttgttccaaatatactcttttgtctttctctttattcccacgttcgccctttgttcagtccaatacagggttgtggggcccttaacagtgccatattaattggtatcattatttctgttgtttttgtttttgtttttgtttttgtttttgagacagagtctcactctgtcacccaggctgcagttcactggtgtgatctcagctcactgcaacctctgcctcccaggttcaagcacttctcgtacctcagactcccgaatagctgggattacagacaggcaccaccacacccagctaatttttgtattttttgtagagacggggtttcgccaagttgaccagcccagtttcaaactcctgacctcaggtgatctgcctgccttggcatcccaaagtgctgggattacaagaatgagccaccgtgcctggcctattttattatattgtaatatattttattatattagccaccatgcctgtcctattttcttatgttttaatatattttaatatattacatgtgcagtaattagattatcatgggtgaactttatgagtgagtatcttggtgatgactcctcctgaccagcccaggaccagctttcttgtcaccttgaggtcccctcgccccgtcacaccgttatgcattactctgtgtctactattatgtgtgcataatttataccgtaaatgtttactctttaaatagacatttctggtctgtgttttatttcatgcgtctgggagcggataaagtgtgaggttcagggagaaggagaggtctgtctcaatgctttgacccagcatcaaagcaatctcccctccttgttccctttccctgctagttcccaatgactgacagattcacagcagaacagaaaggactgggaagggatggaggtgggacatctggcgccaatattcaggggctgaccctgtgagggaacatctgccctgaagagttggagccttcatgtgatgacacagagatctctgtcactgtattcagggaaaggatcaagcctcactccccatgcagggaggaggttctggctgtgatccggcctgtgggagaagtgaggacccgctccctctacagtgacagccaagaacctgcaggtgacagagaaggcttcccctcaactgtctcctatcaggttcttccaggcatcaaggaatagacctgggacattgcctccagtgacatgaacacacccagaagtgaggtggccctgccagggggtcctggtgctgccacttgttttgggagctcagtgtctggagaggggtgtggagagtaggctttctgcaaaacagtaatcatgacctataaattattttattcttcattagctttttgccataaaataaaacaggtacccaaaaagaaaaactgtctgaaaatgttgccctttaataataataataaataataataataaaagataaacaccctttaaccaccagagatatagaagtttgtcagccagcccagaaaccatcatttgccccagctcagtgataaaggcttcccttccccacataaaatcacagcctgacctttatgatgattgcttctttgttctattttatattttcatcctctgaaattgtagtttagttttaccttgggatgtataatttttgttctcttttttcttttttttttttaagacggagtctcactctgtcacccaggctggagtgcagtggcatgatctcggctcactgcaagctccgcctcacgggttcatgcgattctcctgcctcagcctcccgagtagctgggactacaggcgtctgccaccacgcccggctaatttttttgtatttttagtagagacagggtttcaccatgttagccaggatggtctcaatctcctgacctcatgatctgcctgcctcggcctcccaaagtgctgggattacaggcgtgagccaccgcacctggcctgttctctttttttctctatgctcctccttgaaattttattgtctggctgagttttccatagtttgcattttgctggctccaccccaaggcatagtttaatatggacctgttttatctgtactttctataaattggtagttggctacagagatttgcttatagactgacttgattttcttcttgaatacttcatttatggcactccattgtattcttccatcaggaggaagaacttagtactggttatttacttttactctacttttaattgccattgcttttcaatggctaaatctgttaattcgttatgggttgcaaaagaattatagtctcagtctctcattccttccccattcactagctgaataatttctaaaataagagatttacccttggctggatgcggtgacttacgcctgtaatcccagcactttgggaggccgaggctggtggatcacctgaggtcgggagttcaagaccatcctgaccaacatgaagaaactgtgtctctactaaaaacacaaaattagccgggagtggtggcgcatgcctgtaatcccagctactcgggaggcggaagtaggagaattgcttaaaccgggaaggcggaggttgcagtgagccgagatggcgccattgcactccagcctgggcatcaagagtgaaactccgtctcaaaataaataaataaataaagtggagcacttgacggccatgggagagaatcggctataaccacacacagcaagatgatgagcccagcaaagatgatgagcccgactacatgaaaacaacttctaatttcattcaatcagaaccaacagaactcatctacagtgttaaaaatcaagacagtggctactctagggtgggggaggctggtttatgactcaacggtgtttcttggagggtgaaaatgatgttgcttgatgaaggtgttgtttatctgagtttttacttgggcaaaacccactgcccacctgtgatttgtccacctttctccatgcatgttgtccttcattcaagtttacatttctggtgttttgaaacaattctctctaagctaatatagaatttctcctactccaagtccttagaaatgctgcattgaaaataccagtgaattttttttttaattccaggaaataaatgcccgtgactcagatataaaaaggagaatctacaagagcagtaggcttgggagctgacaccagaacagctttggaaagggctgtcgagccaggaactaggaatcaaaacccaaacaagaccacaggaggtagagggtagaaattatgccccagtagtgcatgaatgaatgaatcaagggcagtgactcatgggttgcctggccagtctggaacttggggaaaataaagttggaaaattgggggatggaagagagaagtgtgcactgaccactttccatgggaagagcatgtgaagatagaggttgcatatggatgcctgccagagggtctccaaggggctggggctccctgtaaccaggtgagcgagatggcttgatggatgatgccactcagccgcacaaggcttgctcatgagtccctgcacaaagtggccgtggtggctgggatggacactgcatggacagagcaattgagtcaccactcaccaaggctgacctggcagctgccactgctgaggacccagcctgccaaaagcagctgtttctttgaacagagaaaaaaaacagacaatgttaattaagagcaagacagtgttatgacagataaatatgccactgcagctatagtagagatgtaaacaatcttgaaattataaaaaaaaaaatgtcgatggaaaagacttactgcaagtaagaagttaaaacagttgtaaaaattctatctctgcccaactatatacagattgtttcacagggaagtcctactaaaccttcaaagaaggttattggacttatttaaaatattcaagagaatggagcaaaatacagaaagctaggcaactcactttatcagctatgaatagtgttaattctaaagccagttagggaacaaataataaagaaacaagatgggaaaatcactattagtaattagatgtaaaatagatgagaaaaatagtagactgtgtccatcagtgtgctataaacaaattaaatatcttgaccaagttatgaatcccaagaataaaagaatatttaaactttaaatcttttaatgcattttaacacttaattcaataatttaaaaagagacaatcatatttcactagatgtagaaatcactgtagatgaaatctaacactacacctgacctacatttcttcagttatctccacttttaagaatttgtgatcagtgcagcactattcacaatagcaaaggtaaggaatcaacccagatgcccatcaacagtggaatggataaagaaaactgcggcacagggccaggcgtggtggctcacgcctgtaatcccagcactttgggagggtgaggcgggcagatcacgaagtcaggagttcgagaccatcctggctaacacagtgaaaccccgtctctactaaaaatacaaaaaattagccgggtgtggtggcgggcacctgtagtcccagctactcgggaggctgaggcaggagaatggcatgaacccaggaggtggagtttgcagtgagccgagatcacgccactgcactccagcctgggtgacagaatgagactccgtctcaaaaaaaaaaagaaaagaaaagaaaagaaaactgcagcacttatacaccatggtacgctacccagccaaaaaacaagaacgaaatcatgtccttcacagcaacatggatggaggtggagaccattattctaagcaaattaatgtaggaacagaaagccaaataccacatattctcacctataagtggcagctaaacattgagtacacatggacacaaagaagggaacaatagacactggggcctccttgagggtggagggtgggaggagggggaggattaaaaaactgcctattgggtattgtgctgattacctgagtaacaaaattatctgcacaccaaacacccgtgatacacaatttacccatgtaacaaacctgaatatgtatcccttgaacctaaaaaatcaaaaagaaaaaagtaaaaaagaattcctgatcagattgagccaggacaatggccgggcgtggtggctcacgcctgtaatcccagcactttgggaggccgaggcaggtggtcagggtaggcctcttggaggagccatgtgagcagacttgagaaggagagacacagccatgcagatatttgaaggaagaaccttccagtatcccgctctaagcatacccaggactctgctctggggcagaccctaaagctgcagtggaaatggaggtggccacactcacagagactgtggcagagagtgatggggatttgggtctccccttcctgctgtggctgttagaagtgctggagttggggagggaaaggcactggcatgtggaggaagactaggagaggaggggaggctgaagtgtgtcccactctcactccacctctctgttctctatctcctgcatccggtgcctccccgacttccccaaagttgtggtccctgacaaggaggaccctgagggcaaccacaccttgccatgtagagcacctggcttctcacttgccaacatcactctgacctggctgcaggaaggggaggagccaactctggactcaagactcaaggggaccagacccaggaagatgagacatatcagggctgggcagctgtggggggccctcccagagaaggcctgagatacacctgcctgcaggtgctcctgggcctggagaagcccctcagtgtgactaggtgaggtgttgtcagaggaccagaggctgagggtggggcgtcccatccagatcctgcccccctctctgccccagcacccaaggccccttcctccctcctctatggagatgctggggatgtcctcattctccctctgagcactcacatctcacccctcatctgtctctctaacctccttccttcctgctgcagcttctgccccagccccaggctctggcctctctctccccagttccaccctccagggggtgatggttcacttccctctgaggagccagcactaggtgagaggctaggagaaggaaaagctcatgggccatgggttgggagggagaatgggcactgaaatggaagggtagggagacagaagaggcaggtatttccaaatcaccatttttctgtcatggtccaagggtgccatccttctcccaggcccagggatgtggaaagagcagcaggaattgggaaatactccacaggaaagaacaatgtgcctcctccctccaccggcttcttcctcttgtctattctggtcaattctctaagtgaatcatgttaccaaaatgtaaaatgtttattttaggaaagtctccaaatattagggaataaaattactagtgcctaagccctgcatactgaaaaacagaagctttaagaaataaagacctgcatggaaaattgctcatcaactcggggaagtcaaagtctgagctgaatcagctctttttttctttctctttttttttttttttttctttttttgagacggagtcttgctctgtcgcccaggctggagtgcagtggcatgatctcagctcactgcaacctctgcctccccgactcaagcaattctcctgtctcaggctcccaagtagctgggattacaggcatgcgccaccatgcccagctaatttttgtatttttcagcagagacgaggtttcgccatgttggccaggctggtctcaaactcctgacctcaggtgatccgcctgcctcagcctgccaaagttctgggattacaggcatgagccaccatgcccagctgaatcagctctaaagtggtgctgaagtgagagccatttatgtgcctgtgtgagttcacacaggtcttgagacctctgtgtcctccttagaagagtgaagtgagcacccagtgcctagaccttggttgtgataagtcattctctgataaaaggattcagggctccatagaaaaacagctgattctagggctggcataggaaaaatataaggtgagcctggaacatcttgtaatgccagaaagtaaccgccacccatctcccaaccctcaccaccaaaaaataagggcatgtcagagggacacaggagtcaacctgaaagagctccctatggacaaagccggaataatccgagcaacaaagttacaatagtattggattatgacccaaaatataaataaatattcattccacactgatttatttaatcaaaaataattaaataaataaatagggaagaaggggcaaatcttccttacagaagaatttcaaaacatatattacgagaatctctttcccaggagattggaattttatttctctcaccttgaatatgggctggacttgctgacttgcttccaaagactagagtatgaaaaaggaaaaataataactttacagtggagaaatgtagcagacactaccaagcaatcagagtcatgttaacatcttgccccccagaaatgatgtgatgaggacactcccctctatggtattcttcccttaaacccataaccccaatctaatcataaggaagcatcaggcaaacccaaagtgagggacatcctacaaattatctatccagtattcttcaaaactttcaaggtcatgaaaacaggtaaagactgagaaactcatgatcagaaagactagggagacccaaaagctaaatgcattaatgggccctggaaaaactggtgaagtccaaataaagtctacagtttagcgaatagtattatagcaatgttaatttcttagtttcttagtcttgacagaattttgttagatgttaacattaaggaaagctggggtttatggaaactctgtgttctagctttgcaactctttaaatctattattgttattgttattgggtttttttgtttgttttgtttttgtttttttttgagatggagtctcgctctgtcgcccaggctggagtgcaatggcgcgatctcagctcactgcaacctccacctcctgggttcaagcaattgccctgcctcagcctccccagtagctgggattccaggcacccgtcaccacgctcggctagtttttgtatttttagtagagatggggtttcgccatgttggccagggtggtctcgaactcccgacctcaggtgatctgtccgcctcggcctcccaaagttaaatctattattattcaaaacaaatttaactaaaagtgaaatgaagctaggtacagtagctcatgcctgtaatcccagccctttgggaggccaatttaagcccaggagtttgagagaagcctgggcaacatagtgagaccttgtcttataaaaaaaattaatttaaaaaatgaaatgaatagacatatattaaataaattaaatcgataattaataacattcagaaacagaaaacatcagccccaaatgggtttactgataaattctatcaaacatttaaggaaaaaattataccaattttctataatctcttccagaagacatactttcttttgttgttgttgttattcagtgttaatttcataatcataaacttaatgctgcaatccagctaggcatggaagggaacaaggaaaacatgaaacccaaagggaactgcagtgagagcacaaagattctagatactgcgagcagatggatggagggtgctctcctgagctacagaagcaatggtctagtggttaagataaaacacaagtcaggccgggcgcggtggctcacacctgtaattccagcactttgggaggctgacgcaggtgggatcacctgaggtcaggagttcaagaccagcctgaccaacacggagaaaccccgtctctactaaaaatacagaattagccaggtgtggtggcgcatgcctgtaatcccagctactcgggaggctgaggcaggagaatcgcctgaactcaggaagcagaggttgcagtgagccgagatggcgccattgcactccagcctggcaacaagagtgaaactcagtctcaaaaaaaaaacacaagtcaaacttagtcaagttgtgtacagtcagcgatggtgatcttcttgatggtcttgccattcccagacccgaagtgctccatggcctccacaatattcatgccatctttcaccttgccaaagaccatgggcttgccatccaaccactcagtcttggcagtgcagatgaaaaactgggaattgcccgggctaggtggctcatgccgtaatcccagcactttgggaggccgagatgggcagatcacctgaggtcaggagttcaagaccagcctgaccaacatggtgaaaccccgtctctaataaaaatacaaatattagccaggcatggtggcgcatgcctgtaatcccagctactcaggaggctgaggcaggagaattgcttgaacctgggaggcggaagttgcagtgagccaagatcgcgccactgcactccagcctgggcgacagagttaagactccatctcaaaaaaaagagaaaaaagaaaaaccgggaatcatttgtgttgggtccagcatttgccatggacaagatgccaggacctgtatgctttaggatgaagttctcatcatcaaatttctccccgtagatggacttgccaccagtgccattatggcgtgtgaagtcaccaccctgacacataaaccctggaataattctgtgaaaggaggaacatttataatcaaatcctttctctccagtgctcagagcacgaaagttttctgctgtctttggaaacttgtctgcaaacagcttgaaggagacacagcccaagggctcaccattgacagcgatgttgaaggacacggtggggttgaccatggctgatagtatggggctcctgatggtggcgtctgcaaagccaagacagacactttctatctcatttcatgaggccgggattccatgagggaatactttctaactaattccatgaggccagcgttagccaaataccaaaatcagatgaagacttcacaaaaaaagaaaaccacagaccaatatctctaatgaacataggtgcaaaaatcctcagcaaaatgctagcaaatcaaatccacaatgtatgagaagaacaatacaccatgcctaagtaagatttatcccaggtatgcaaagttacttcaacattggaaaatcagttaatgtaatccattaaatcaactggctaaagaagaaaatcacatgatcatatcaatagaggcagaaaaagcaattgacaacatccaacacccattcatgatgattaaaaaaaaaaaaatctcttagcaagctaggaatagagaagaccttactcaacttgataaacaacatccacaaaacttccacagctaacatcacacttaatggtgagaaactaaaagcttgcctgctaagatcagaacaaggcaggaatgaccctctcaacacagcttttcaacgttgtactggaagtcctagctaaagtagtaagacaagaaaaggaactaaaaggtatacaaatttggaacaagaaataaaactgtctttgtttacagacgatatgattgtctatgtagaaaatcaaaaagaatccacacataaaaaactcctggaactaacaagcaattatagcaaggttgcaggatataaagttaatatgtaaaagccaatcacttttctatgtatcagcaatgagcatgtagaattcgccatttaattttttttttttcaagacggagtcttgttctgtcgcccaggctagagtgcagtggcgcgatctcaactcactgcaacctcctcctcccaggttcaagcaattctcctgcctcagcctcctgagtagctgggattacaggtgtgccccaccatgcccagctaatttttgtatttttagtagagacggggttttaccatgttggccaggctgatctcgaacttctgacctcatgttctgcctgcctcagcctcccaaagtgctgggattacaggcgtgagccaccgtgcctggtccagaatttgccatttaaaacacaataccacttacattagcacccccaaaaatgaaacacttaggtacaaatctaagaaaatatgtacaagatctatatgaacaaaactacaaaactgacaaaagaaatcaaagaactaaacaaatggagagatattccatgttcatagtcaggaaggctcaatactgttaatatatctgttctttccaacttgatctgtggaatgaatgcaatctcaataaaaaacctcagtaagttattttgtggatattaacaaactgattcaaactttatatggtgaggcaaaagacctagccagcacaatataggagaaaaataaagtcaaagaccaccactacctgacttagactttctataaagccatagtaatcaagacagagtggtgattagcatagccattgtgggaaacggtatggaggttctgcaaaaattttaaaaatagaaataccacatgatccagcaatcccactaatgggtatatatccaaaggatatgaaatcagtacgttgagatatttgcactcccatattcattgcatcattattctttttttttttttttttcctttagagatagagtctatgttgcccagggcaactcctggcctcaagcgatcctgctgtctcagcttcccaattatctgggattataagcacgagacactgcacctggctgcagcattattctcaatagccaagatatagaatccacctaagtgtccatcaatggatgaatggataaagaaaatgtggtatatataaaaaatggaatactattcagccttaaaaaacaaaatcctgtcatttgtgacaacatggatgaacctggaagacattatgttaagtgaaataagccaggcacagaaagacaaatacaatctcacttatatgtggagtatagaaaaagccagactcataaatagagagtaaactggtggttatcagaggctgggaggtcggggaattggggagatgttagtcaaagaacacaagatttcagttaggaagaataagttcaagagatctattgtaccttatggtgactaaacttaataacaacatattgtgtatttcaaaatagtatgagaatagctttaagcattctcatcacatacacacaaaatatgtatgtgaggtaatatacatattattaaattgtttggtttatccattccacaatgtgtgtgtatgtatgtgcatatatatataaacatgatgtacaccacaaatgtataaaattagtcaatcgaaaaattaattttagaaagacagagtggcattggcaaagaatagacaaattgatccacttgagcagaatagagagccaagaaatagtcccacataaatacaaggagcaaagacaatacaataaagatagtcttttcagcaaatgctgctggaacaactggacagccatgtacaagaaaaatgaaaagagctctcttaaaaggttactgtgaaagccacctgtgacagtaacagaaagtgcccagaagggtctctgacacttagtaatgtaatctctctcactgtaatgtaatggctaaacttcaacatccctcagcccccatctccataagactttcccatagaggcaacaatgattcctgtcagtcacccagtcctgccaatccactgggtaggatacaatattgaggggcccatcagcacactggccttagggggctctgcagccccttgaccttgtggatgatgctggccttaatctcctcttgtccgtggctaaagacaggccccttctgcggaggccaggccagaatgctcatctgattaagactctatattaagagtcaggaataacaaaaacaacaataaataaataaacacagtaacataatctatgtgtcttagtccgtttcctgccgctataacagaataatacagactgggtaatttattttgttgttttttcagacagggtctctctctgtcgctcagactggagtgcagtggcatgatctcgactcactgcaacctccacctcccagactcaagtgatcctcccacctcagcctcctaaataactgggaccacagacccgcacgaccacaccagctaatttttgtgtttttttgtagagatgggttttgccatgttgcccaggctggtctcaaactcctgggctcaagccttccacccaccttggcctcccaaagtgctgggattacaggcttgagccaccacacccagcacagactgggtaatttataaagaaaataaatgtttttcccacagagctggaggctgagaagtccaagagcatgacactggcatcttatgagggcctggctgcagtatcatcccatagtgagaggtggaagggcaaagaggctgaactgatttctatcatgccatacaatggcattaatctattcaatctaatcaaccctgaaaggtcccacatcggctgggcacggtggctcatgcctgtaatcccagcactttgggaggccaaggcaggtggatcacctgaggtcaggagttcaagaccagcctgaccaatatgatgaaaccccgtctctactaaaaatacaaaaattagctgggcgtggtggcatgtgcctgtaattccagctactcaggaggctgagacaggagaatcacttgaacatgggaggcggaggttgcagtgagctgagattgtgccattgcactccagcctgggcaacaagagcgaaactccatctcaaaaaaagaaaaaaaaaagtcttgcatcttaataccattaggatagcaattaaatgtcaacacgagttttggtggggacattcaactttagcactaggtattctggtttatgtatttttttagcttaattccttcatttctacaattatgagatccacgattatccactatatttggttttctttctttttggttttgttttttgttttttgagacaagagtctcgctctgtcgccaggctggagtgcagtggcatgatctcagctcactgtaacctctggctcccgggttcaagtgattctcctgcctcagcctcccgagtggctgggactacaggcgtgcaccaccatgcctggctaatttttgtatttttagtagagacggggtttcaccatgttggccaggatggtctcgatctcttgacctcatgatccgcccgcctcggcctcccaaagtgctgagattacaggtgtgagccactgcgcctggcctcatccactatatttgaaccgacccaaaggccagtgctttcttaattaagttcccacaggtgaacaaagccaaaattcagattctattttatttatggtttagaattacctactgtgaaaaaaaaaaaaactagctactataaattattgggggttagtccatttagtccattttggagttcataacctaaagcagaaactcacatggttgaaatgtcactttcccaaaggattgttattagtgtatcatttagattgtcttgcaaaagtctcatttgttgttttttctaaatggctgctaatcttttaaattaacagatagagggccaggcacggtggttcacacctgtaatcccagcactctgggaggctgaggcagtcggatcacttgaggccaggtgttcaagaccagcctggccaacatggtgaaaccctgtctgtactaaaaatacaaaaattagctcggcatagtggcacacgtctgtaatcccagcttcttgggaggcagaggcataagaattgcttgaacccggcaatcggaggttccagcaagcagagattgtgccattgcactccagcctgggtgacagagcattgctctgtccacctcccaaaaatgtagttaattttttttcttttctttttttttttttttttttttttttgagagacggagtcttgctctgtcgcccaggctggagtgcagtggcacaatctcagctcactgcaacctccgcctcccaggttcaagcaattctcctgcctcagcctcacaagtagctgggattacaggtggctaccaccacgcttagctaattttttgtatttttagtagagacggggtttcatcatgttcgccaggctagtcttgaactcctgaccttaagtgatccccctgcctcggcctcccaaagtgccgggattacaagcatgagccactgcgcccggccaactttcaatgttaattagttgtggattgtttaaccatatactgcatagtttcgcttatctataataacagtagtttggggctcttatattctaataattaagactttagctgtgtacacattgcaattaaagtatgagtcatgcataaccttatcaccaagatacaagagggaaagcccttctcccctaaaacttttacaaaggttctgggttctttttccacttaagtgggaaaaagtcagctaatgaggaacgtaaagtctttggcctcatctaaaggtgctttggcccgcaagtgtgagaagcactgaccgctgggaagtcctcactgcctggttcctggactcttacaccatggcagaggccatcttccctcccaatgcagagtgatatccagatagcgagctggctagcagctgtccactctccagcaatcctgccttctggggcatggttttctaaggaccttcctgttcctagatgatcaaaattgggaccagccactcccttctgagccactcctgcctctgggcctgtggctatgtcacagtccagtcacaacaggacatcccttcagaacaccctgcaggaagctgacatctctatgcagactcacacatgcacggtgtgtgcacaggcctttggttctacttcaggaggtgttgggggaggctcactagtccaacagaacttgaggccagttgtaccagtgtcatatcccaggagccaaggttacaagggatacaaagtgcccagacctaccagagaaggcaaacccctacagcatgcagggctagacaggggcaagaaacaaggtcattctgggccagcaagaagagggaaagggaaatgacaggcatacctcggagatactgaagatttgtttccagaccatagcaacaaagtgagtcacacaaactttttagtttcctattgtgcataaaagttatgtttgtactatattgtagtctgttaagtgtacagtagcattgtgtacaaaaaactgtgtatatacttaatggagtctcgctctgtcacccaggctggagtgcagtgccacgattttggctcactgcaacctccgcctcctgagttcaagccattctcctgctcagcctcccaagtagctgggactacaggtgcccatcaccatgcccagctaatttttgtatttttagtagagatgaggtttcaccatgttggccaggctaatcttgaactcctgacctcaagtgatccacccacctcggcctcccaaagtgctgggattacaggcgtgagccactgtatctggccatatactttaattttaaaatacttaattgctaaacaaatgctaacaatcatatgaggcttcagctaatcctgatctttttgctgggggagggtcttgcctccatggatcaggggcatggctgctgaaggctgctttgacaacttcttaaaataagacaatgatgtttgccatttgccgcatggattattcctttcaatattgttgtgcctcagggaatagggaggcctggaaagcagagtcgggagaatggccagttggtgaagcagtcacaacacacacatttttccattaagtttgctgtcttatatgagcatcgctcatggtgtcccaaaacaatcacaatagttaacttcagtaactgattacaggtcactgtaacaagtataataatgaaaacgcttgaaacattttgagaattccacagcgtgacatggagacatgatgtctgcctgctgttgggaaaatagcaccaatagacctgtttgatgtgcttgacacagggttgccacaagcctccaatctctaaataaaaaacagcatctgcaaagagcaataaagggaagcacaataaaaggtacatctgcaaaggggaatcagcacttaagcaaggtcaggatgagctttcaagtcaggtggacctagacatgaaccctccaggccctaccaacaaccagctgtggaccttcgagcacatccagcctagagctgcccccaacagacacttccccagtgaatgctgaatgaaaccatctgagccagtttcctcaggtgcaaaccagtgaggtaattcctaccttgcagagtgaagtgagaaaacagtgttaagaaaaaggcatgccgggtgcggtggctcacgcctgtaatcccagcactttgggaggccaagacgggcggatcacgaggtcaggagatcgagaccaccctggctaatacggtgaaaccccgtctccactaaaaatacaaaaaattagccgggcgtagtggcgagcacctgtagtcccagctactcgggagggtgaggcaggagaatggcgtgaacccgggaggcagagcttgcagtgagcccagattgcgccactgcactccagcctgggcaacagagcgagactccgtctcaaaaaaaaaaaaaaaaaaagacacaagacctgtggtagcctttcctttctgtctggcagcagccactgggtaaaccaagatggtgcatacaagtacatccagaagctatggaagaagcagtctgatgtcatgagctttcttctgagggtccgctgctggcagtaccaccagctctctgctctccacagggatccccgccccacccagcccaataaagcacgctactgggctacagccaagcaaggttatgttacatataagcgccacggtggctgaaaatctagttcctaagaaggcaacttaacagcaagcctgtctatcatggtgttaaccagctagtttgcttaaagccttcagtctgttacagaagagcaagctggatgccactgtggggctctgagtcctgaattctcactgggctggttaaagattccacatacaaagtttttgaggctatcctagttgatccattccataacactatcagaaggaaacctgacacccagtggtccacaacaagcatagggagatgcgtaggctatctgcaggccaagagagccacggccttggaaagggctgtaagttctaccacactattggtggttctcgccatgcagcttggagaaggtgcaatactctccagctccacagctaccggtaatgtttctaaaattcatacctaataaacactagatcaaaaaaaaaaaatcacagacctgtggtaggctgggcaccagtgctctaaagcaagttctgcctaaactggcagggacatttttcacatcaggaacaggagttgttcctggactctgtctggggccaggctgggagagacgtggggcagagtggggcaggggcaggggcagggctgggggctggggcctgggcagggccaggcactcaagtgaggccaagtcctggagcgaaccagttcctggtggccgttggacagctcacacagctcccggccaggtcacccgccatggtcctccctctgccctggctctctcggtaccatttccttcgcctccttctgccctcctggtccttggcaccccagggctcccatgggtgctgctcccaaaaccccaaagcaagcatggaagagcagaccaactccagaggaaatgggaagatgacgtcccctcccagggtaagtggcaccacaggtaggaacagagggtgtgagaatttacactggggtgtgggaaaaaaaaaccctcaatcccaccctgcaccaccccacaccatgcctacccctgcagctcttttcttagttcagctaccaactcctctccccacctcccccagcccagacctcagggttcccttccctcaccccacccccacccacaacagcacagtccacaaagtccttgaacaggatctattccccctcacctaacagttaattatttcttagcggggaggagcggctgatcctctttccagtgaccccatatccttgttcaaggaagccagttacagcccctgggccagggaactctatttgctccccctactaccacccagaggcctatgcccaagacaggaagctacctggccttctcagtacaggtgtccttaaatgaccggttcaaaaacgaatagggaaggtggaatttctcacttccagccacagcctgcgacaaagcttcccagggcctcggccccctgccctggctgatgctccctcccttaattccctgaccagggccctgggacccaccgcacagctgagctggcccgagctgaagagttgttggagcagcagctggagctgtaccaggccctccttgaagggcaggagggagcctgggaggcccaagccctggtgctcaagatccagaagctgaaggaacagatgaggaggcaccaagagagccttggaggaggtgcctaagtttcccccagtgcccacagcaccctccggcactgaaaatacacgcaccacccaccaggagccttgggatcataaacaccccagcgtcttcccaggccagagaaagtggaagagaccacaaaccgcaggcaattggcaggcagtgggggagccagggctctgcagtcttagtcccattcccctttgatctcacagcaggcagggcacccaggccttataggaattcaccctggaccatgccctaaaataacctcaccccaaatacaataaagggacgaagcacttatagataccacagacacatgtgtttcatttttagttttgttaaaaaaaaattctgacaaatcagaaatgggggttcaggagtggtggtgatgcaaaagatggaagccatggggtgggggctgtcaggggtgggggcagtagtgtctccttcacccccaccctggtgtcctctcctgaaggacagacggtcacattccaaaatgggcgagtcttctaccgtgtctgttcaactgagaagaaaacgtagcatggtcagaataaggcatgaaaaggggaaagtgaggcaggaacacacggcacacatgcagacactggtgtactgcctgggttcagaggacggacgtgggggtgagggaagggatgtaatatgatgagagaagacagaaaccccacataaaggtcagaaaaacatcccaacacagcatcaaagaccagggggcatgaaccagtcaagtgtccattatgcatcagatgcccatgacctatgtgatgggatttaggacaaacacactaaggaacagggaggacctaaagggtttcatgagatcagtactcactgtaggaggagatgtctatctcatcaggcagctcactaatattgacctcaaagcgatcctgcacatcattgaggatcttggcatcattctcatcggacacaaatgtgatagccaagcccttggtgccaaaccggcctgctctggccacctggagggagacagagggtagcactggaagaccgaagaggaaagagacccagaggcaggaatgaagatgtacaaacagaaaacaagggaatgggagagtgggattttttcagcctgtgaggtttacccgatgcaggtaggtgtcagaatcctcaggcatgtcataattaaaagcaatgttcacccgctcgatgtccatgcctcggccaaataggttggtagccacaagaattcgtcgttgaaaatctttaaactgctgataccgagaaagcctttgtgagaaaggaaatttaaaacatgttgagattcccttctctcaactgtctttttctcccaaggacacaaaatatctttcccatcttcagctcacctctcctcctggggcatcccacggtggatggcaatggctgggaagttctgctccactagtagctgggccaaggcaatgcaccgctgcacagacttcacaaagatcaccacctgttgtggggtggggtggggggtcgcaaattgggggaataggggtccatggtgtgtgagagacattacgtgggagaggggagtttctagtaattacgttctcaggaattcctcttcatttctcttattcccccactatatatttagagcagaaaaggaaatataactttatttcagcactgatttttccctaaggaagctggcctctgaggtagcacagagttcagaaatcaaaattgccagacatgctaggagatgaggatgagatcacctcatgaaaaagtgataaaaaactagaattaagatctggaggggtaactgatattcctgctcaccaaaacattaaacctaagggagctatcctaattctagaaagcagttttaaatgcaaatagaccactcacaagtatattaattaaacacttttttgagatggggtctcactctgtcccccagactggagtgcagtggtgcaatcgcaagtcactgcagcctccaccctcctgggtttaagagatccttccacctcagcatcccaagcagctgggaccacaggtgcacaccaccacgcccagctactttttttattttttatttttactatttgtagagacgggcgtctccctatgttacccaggctggtcttgaagtcctgggctcaagcaatgctcctgcctcagcctcccaaagtactgggattatgggcatgagccactgccctgcacccagtcagaaatgcttctcttgaataagcagttattagaggaattaaacattcaagaaccctaacatgcccccaaacatcgtttcaagacttttaacaacttcctaaaatccttcaaggacttttggagacaagatctcactctgttgcccaagctggagcacagtagtgcaatcatagttcactgcagcctcaatttcctgggctcaagctatcctctcacctcagccaccagagtatctgggactacaggcatacaccaccacacctggctaatttttttcttctttggtagtgatgaagtttcgccatgttgcccagactggtctcaaactcctggactcaagtgatccacctccctcagcctccccaagtgctgggattacacacataagccaccgtgcctggccaaggatcttaatttttgaagtttattttccttgaggttattgaggacatacccgtgccagccatagaatagaaaagcagctcccaccttactcatgctcagcccctaagatatttataccctcattattctctcccacatcacacatgtgatttcctcaataaaagtgtacttaatatccaggtttctgctacagctggagtgctccaatgctcatccccctactggacgtctaactgacctggttgaactcaaggacatccagaaggtcaaagagcttccggttcttctcgttgtccttcagtttcacgtagtactgctgcaacccatgcagcgtcaacttcgtctcatcatccacgaagatctccattggctgggggggaggaagggggtggggaacgggaggagggcagagtgggggggttaaacctgggggggtggaggaagttgatctccaatacaccccatggggggatggggaggaaagagaagattgaaaaccccaccccactcccaaaaatacccacattttactgtggtctctctcacattacatctaatttccttcctatcagatgagttttaagactgcccaactaaaaactatcatgggaaagaaactgcaaatgaagtcaaggagcagtgaaaccacccaatggcacagatgccattacctcaaatagaggtgggagaggaaagaaaatgggagatgattctcaaagggagagcaaggaccaaacatctgggaaatgatgggaggcagtgactcaaggtcagaataactccatcagaggtgcttctaagaacatggggtggggggaggacaactgctccatttgattctcctacttcaactaagagaatctcgtgtgcattagcaaagtggatgtcttttaagatcagaatgctgcaatggacagtcaaaatgccacttaaggagaaacaaaaattactcaagatgagttacttgccgtcagaccacaacaggatagttttagatgagactggtctcttgactaagaattaaaccatctacaggtttacaggaaaggtatcagtaagtggtgttaaaataccaaattcagagcagcagatacgcttttaagggacaggatctcaccatgttgcccaggctggagtgcagtggctattcactggcacaatcatagcacactatagcctcaaattcctgggctcaagtgatcctcctgcttcagtctcctgaatagctgggactacaggcacacaccattatacctcactgcattcatctttaaaattaaaaaaccccctgaaggggaggaaagtaacaaagacagaaattaccacaactccaaagcccaactttcctaacactttttatactatcctgggggaagatagttaatatgaagacccagaggacaaaataggaaaggatgtgtgtgtcatgggaaaaaaaccagaagcccaatcccagaaggcaggttttgttttttgttttgttttgatacagggtctcactctatcacccaggctggagtacagtggcacaattacagcttactgccacctccacgtcccgggctcaagcaaaccctcctgcctcagcttcccaagtagctgggactacaggcatgcgccaccacgcccggtttttctggtagagacaaagtctcactacactgccccagctagtctcaaattcctgggctcaagcaatcctcccaccttggcctcccaaagtgctgggattagaggtgagccaccaggcccagccaaggcaggctttctaaagagaagttccatggcctccttcaaatctcattctagccccaaatacagctaaagagtgatcatcccacgggaagaacactgcagggaggggaagaacacactccactgcttatgcaattggccccacctagccccaaaccctaacaaccacccgattacatccactttacctttcctatgtccctctcctctgagtattaaaaaaaacaaaaaaatttttttaagaaaaaaaatctaccaccccattcaggacacccctccccaacacatattgggggaaacggggcacggcacgcgttgggttcaggaaaaaaaccgggaacggaaaaagaggctggtttggtcctcagcttcctggtcaggtttccccgcggcctccgctgccgccatccaccgctgggtgccgtctgcattccctcgccgcgccacggtgcttctctgttgccggctcacatcaaccgaggttccagatgggtgcaaggagatgtgggtgggaaggagtagggtatcggggattgaggtgccaaaggcccccacccctggaggtggggaaggggaggattcatttgtgctgatgctcttcttttggacatgccctgccatctgtctgtccctctcttgctctcctgccaccgggaagtaggagttttggtgagcagaaggctccagctgtatgctcgatgccaccttgagggtgcgtggctgtagggtgcatgtaagagacgatggatgggtgggtggtagggcagaaaaatcctgccctcccccgaagggagaagaggttcaaaaatgttgtgatttatgaaaaagtcgaacactacccgctctcacattaacccgaccaagtcttccggagtttccctggcacccgcgcaggccctaacactagctgtctctgcttctgtatgtctcttcaaggagtcattactcccagttgggcacaagccgccttcttggcacttgaatgacaagggagtctgaggaagagggcgaggaaggggaggaggcagcgggcggggagtggagggagagaaggtagaagggtatttacatcttgcatgaacttgcggcagactggacggatctctttgctcaaggtagcactgaacatcatgacctgcttctcgtggggggtcatgcgaaaaatttcctggacatcccgacgcatgtctacaagaacaaggaaaaaaattgtaggagaaaataagcaggtatgataaacaaagattagaggtagacttcccagtgaggtgaagattgctggaaatagtaacaacacaatggaaagagcaatggacttggaatcaagaagtgggatcagattccagctgtttgttttaaccaagcaagaaataaggtaaaaccccaaagttcccaactatgaaatggggataaagcccagtgcagaggctctcaaggccttcaaaacatgctttatgggaccttctcccaaccctttcctgcccaagccccagccagccttcagcagactacaaatatcaagcacatattatattccagatatcagagtccatctatgactctctggattacttttctatcaagtcaggcaaatatgacatccctacctggagcccacctttacagctcaccatatagaattgccaaagatcatttgtaatgacttatggggcctatgtccaaccccactctcattcaccaagattcaattcttacagaaaaatcttccattaaccccacctggcacactagaataccacatcacacaaactgctacaaacactctctacattaatcccagacctgagtctagacacttattcagctataaattctgactgtaaatgctgtgctggagatgccagaagggtactgtcttctctttcagtttagaatctcccctatgactcccagtatatgaatctataatgaaaacggtggtggtggtgatgacttatgcctaaaattatcaaagtcccctattctcaaaggttaaaaacaaaaatcatagaaagatgatagatgacaccctttactgtgcttaaaagcataataaagaccaaccagggaacccagagccatcagtcatgggtgatagataagagtcgtccttgcactgaggtgctcctgtttcaaataaacatcatttggctccaaagaacaactccccagcattagccaagccccagcactgccactcaccgagctgttcaagcatcttatcacattcatccaaaataaagtgtttaatgtgtttgaggttgaggctcttatttcgagccagggctaggatacggcctggagtccccacgacgatatgcgggcagttcttcttcagcacctcttcatccttcttgatagacagaccaccaaaaaaaacagcaacctgccgagccagaagcaaagagtctcaaaacagaggaaggaaagagtccaatccccccagggttcccactctgtttgagctaaaccaatttttagcatgtttccaaactaaaactaactttagaggtcacctaatttaaaaattttatgtcccccccaccaaacactgagggtgattgcctaaagttacatggctagtcggagcagtcaggacaataattcagttctactgacttaatctaaccaacttccttcatttatgaggccaggcttcatttaaaaaataaaggagccaggtgtggtggcacacgcctgtaattccagctactcaggaggctgaggcacgagaacctgggaggcagaggttgtggtgagccaagatcccaccgttgtactccagcctgggcaacaagagtgatactccatctcaaaaagaaataaaataaataaaaataaaataaagccaggcccagtggctcacgcctgtaatcccagcagtttgggaggtcaaggaaagtggatcacttgaagccaggagttcaagaccagcctggccaacacggtgaaaccccatctctactaaaatacaaaatttacaaatttactactaaaaaacaaaaaatacaaaatttagccgggaggctgaggcaggagaatcgcttgaacccgggaggtggagattgcagtgaggcgagattgagccactgtactccagcctggatgacagagcgagactccatctcaaaaaataaaaaataaataaataaaggacagcaagaaatcaccagattagtgtaaagtaccacaaaaaacacatggaacattaaggtttcctaaataaacccagaatctcaaactcttttcacacaaaccccatgaaattactgcttcgggctaaatattatcatttcatgttaaaaccattaggtgaatagttgtttggggatctgggccttggtacagtatcaaataacaccagaaactactttctggtttcaagggggaaaagaacaactgtggaatcagactgtcacgacgctaatcctatggtaaatctaaaatcattaatgaggccaggtgcagtggctcactcctgtaatcccagcactttgggaggccgaggtgggtggatcacttgaggtcaggagttcgagaccagcctggccaacatggcgaaaccctgtcactactaaaaaaaaacaaaaattagccaggcatgatggcacactgtagtcccagctactcggggggttgaggcgggagaatcgcttgaacgtgggaggcgcaggttgcagtgagctgagatcgcgccactacactcacagcctgaaggacacagcgagactccatctcaaaacaaataaataaaaataaaataaaataactaacataagtcgaccagatttgtggcataacaggagatacagcatcacctatgaaggattcttgccaaaaatgcttaacttcaatcagattttttctttttttttgagatgggagtctcactctgccacccaggctggagtgtaatggcacaatctcagctcactacaacctctgcttcctgggttcaagcgattcccctgcctcagcctcccaagcaggtgggactataggtgtgtgccaccatgcacggctaatttttgcatttttagtagagagagggtttcatcctgttggccacattggtcttaaactcctgacctcaaataatccacacgccttggcctcccaaactgctgagattacaggtgtaagccattgtgcacttggccagaatcctcaatattcacacaccactggagctgttttaaagtttccggctttctctgccacataccccaaaattattaaactgatatgattcaaagtcagtataaagtagtaagaaaagggtggtcttgtgttaagcatcatccatagcccaattacgaatcctcctgttacataggaactcaacactctgttacaccacagcaaactaaagcttctccaaaattaaagagactattggcctacaagtttcttatccctccaacttgccacaccctcactctcaggtctctttaccttggcttaccttgacattgggcatgtatttagagaagcgctcatattccttgctgatctgaaaagccaactcccgagtgtgacacatcaccagcacagacaccttaggcaggaagtatacggagacatatggtaaatgtagctcttcattatcccctctagggaagtgactgtcacaaaaacacacctgggccgataataaatgacttcaattctgtgatctaaatcatgaaccccacgcttgcgacagaacatcccccacagctgtcaggttgtcaagggtaacagaggtcatgtgctcatggctctgcaagcatcatgtagttaggacaaaaacacccttcccttatagtcctaaccaaaatcccctccccagcactctccccaaatatacctgcccagtaactggctccagctgttgcagtgtggccaagacaaacactgctgtctttcccatgcccgacttggcctggcacaggacatccattcccagaatggcctgagggatgcactcatgctggactaaaagttggggggggaggaagataaattagacttcagtctccagataactctacctttttcaccatgccaagcccatttcttaccactcaattctcaaagtctagtatttacctggttcttgccaacttccagacccattttacctctctctgctcaattacattcacctcaaaatcagactctcctaattcctcctagctttagcctcctccagatctaggccttcccagtcctagtaacaaaccccttgcatctaccaaccgctcaccttcaatgatcctagctctgtccttatttttcttaatctgtaacaattcatgacatttgaatacctgccacagaccacttctcctgcttaggttgctatacttcgggtcacgtaactactacaaccctggacaaaatgaaggacttggtacctgacccagaagccagtcatctctaaaccagtcatagaggtttccagagaccacagttggcctggcccaacagagggagactacaggtccaagcaggacctttctggaaatttaaaattagaagtcaagtgacaaaattaaaaataagcagacaagaaaagccagtcacaagaatgaatggcagacctggaagtcacttttggatcattagcactttggtgctatcacgaaagaaagaataagcctgtataagcctcctctatccaaaattgtttttgatacttatcccaattttttcttcctcactgtcgccccggctggtgcacagtggtgcaatcacggctcactgaagcctcaaccttcacctgcttaatttctgaacgttttgtagagacaggagtctcgctatgttgcccaggcttctcttgcacttttgagctcaagtggccaccctcctgcctcagcctcccaaagtgctgggattacaggcgtgagccactgcacctggccctgatctagccttaagtataaacccttaccaccacctgagcaacgacaaacacatctttgtattgtacccttaaagagcccaatgagcactacatgcccaagagaaaatttaccttctgacggatgctcaaagccacagtcgacaatggcccggagcaactctggcttgagcaggaagtcacgaaagccagagctgtggatggagacataggagcccttgacatccttcttggcaggggcctcagccccatctcccccagctgctgtctccacctcatcatcttcatagtccaagagctcattgtccacatcgttctctgccataactgggccggcaggggaagaagggaagggggatctggatgggttctcgcaaaataggtgaaaacaaggggtgaagagtaggggattgaggaacagcaaaggaaaacaaagatactatttctaacagaagagctggaggggggaaaaaaaaagcaagacttaatcacgacctcttttccatccccagttcccactttccctaaaccaggaaacttttacctggaaagaaaaacagatacaaaacataaaaacgaaaagcaaatataacagaacagaaaaagcagtaccagggaaagtggttaggacagaggttcccaacaagattagcaatcacagtagcggaaaccagaaaagttggaaggggaagaccaacttataaattcttgatctgaaagtaacagtgaggaaatagaatagataataaaaggtaaaatatgactaataacttagtaaagtggaaaatggagatgacaagtagagtcctgaaaagtcctcaaaggaagactccgctttccctattataatcccaccgttatggatgcctaactcagcagccatcagtcaagggtgatagatgagggtcatcactgcgcaaagcgctcacctttcgaaaagaaaacatcatatggccgccgtccacctcccatagctctcagcctcccacttctcagtatcctcccttccgctgtttaagcaagccttgtgtaattagcatgggggggaggggcggtgcaagacaaatggctcggccacaaaaaaacaaaattcatgtctccaccctacaataagaaagctaataggtgacagagaaaggcaatccccgcccaggctttaacaggatctttaccaagtggtctcacatcactgttacgctacgaaggtgagactccttttggagaaacatacaatgacaccaatcgtatcgtaaacacttggaaggcactccaaattaagttgggcaagtcaaggtgagaaaaatccaactgggcccagaaaccagctcctcctcccagtcccaccgagggccgaaaaagagctcaagaaagaacaaggaaggtgagaagagccccgccctccgcaaataccaagaccaagggacgccgagcaccgcctctcattgatgctgaggcctccaatatgagaagaacccattggaagaagggagcaaaacgaacacaatggcgccgaggacaccatcttggattgggtccccccttagcttcccttccttcccccaggagctctttgctctcgaaagggatgcaagctaaggaaatagcgaaccaactaggccccagcgaccagaccatcgcctgtgaaaagggtatcaggaacccatgtgacgggatgggtgcggagaagcgcagatggaaacggattgtagcgaaggccaaagcttacctaaacagggagagcgcgtatggcggcagcaacagcgacgaaggagggaaatctgccttcacttccggttgcaggcttccctctactccagcctcccgccttcttggctgcaagagcgcaggcgcaagggaccggaaacagggccttccgcggttatacagatccgtgcgctccaggcttgcctttggaaaatgcctgtctgaaatttgttttaaaaccgtttctaacttcactgctaccgccagtaacaaaagatataaaggaaactaacgtctgccccccactgttatctttattctcttatcctactcctctccatgcccctcatctcttcgtttaggtttttgccacgcaggtcttctctgtaggcacccctccgtggatgcgcgaggaacgagtgtggcgaaggctgcgagttcccacggggtccttggcccggtagtgaaggtgacctgaggactgctgggcacgcactaggaaccggcaggccctagctgaggggagggaggagggaagtctcagggaactggattgctcgggggtgtttcccgactctttcccagtcgtggggctggtgggcggtattttcccaaaaggatgctgtccgaggtagctgatgccctagggccagtgagtcaggaaggtgttctgaatccgagcgggaagacggggtctggattcggccccaagtgttaatagtagggcttgagggttatactacattccattaatactgtttttgtttttgttttgagacagagtctcgccctgtcgcccaggcgggagtgcaatgtcctgatctcggctcactgcaaccgctgcttcccgggttcaagcgattctcctgcctcagcctcccgagtagctaggattacaggcgcccgccaccacgcccagcaaatttttgtttttttagtagagacggggcttcacccatgtatgacctcaggtgatccacccacttcggcctcccagagtgctgggattacaggcgtgagccaccgcgcccggcccattaatactgttaattcgagcagaatgttcttggccccgccccaacagccccattgttcaacctggatttttttcctgaatgaaacatttgctatccccgtctttgagatggggagccacaaaagtaagacctgatgtcctgctgtgtaataaaacaacaaacgtttggccctctccctgttagcatacttaatcatttaatactaaggagtaggtaccgttattctcatcttattgacagaagcgaagcaaagcaacatatctcaagcagtacggctggtgaggttacagccaggatgcaaacatctctcattctctattgtattctgcctccctgctcaaagaatctggttagtaaatacactgcaggttaccttattggttcaaattcttggtgaagtaagcttgtcttcagtgacaaatgaagtaactaattcaagaatggtgtcatagaaggtattttcccaagtatcatttaatttattcaaaagtatttatcaactgcctcccttgtgccacatgttgtcctaggatctggggacacaacggtgaacagccctgttctcacagtgtttacattacaggaaagaaaacacataaacacaaatataatgtcaagtatcgataagtggtcagggtgcagtggctcaggcctgtaacccaacccttgaggaagccgagcccgaaggattgcttgagcccaggagtttcagaccagcctgggcaagtgagaccccatctctacaaaaaattttaaaattagcaaggcatagtggcactcgcccgtaatcccagctactcaggaggctgaagtgggaggatcatttgagtccagggggtcaaggctgccgtgagctggaactccagcctgggcaacacagcaggaccttgtctcaaaaaaccagtagcagtaagtgctatgaagaaaatgcaaggtaaaggggcaaagagcacttgctcctacactccagcttttctctacagttgcgatctatagtcctcagattcccaaatgaggaaccatgtttctcactttagagaaataataaagtactacttgttcttgtttctccaagaagtttcaaaggatagccatttgggctgtttagggaatatgtaaacaaaaaacaagaaagtgactgaaggccaggcacagtggctcacacctctaatctcagcactttgggaggccaaggcaggtggatcacttgaggtcaggagtttgagaccagcctgaccaacatggcgaaaccccatctctactaaaaatacaaaaaatagccaggcgtggtggcacacacccataattccagcaacttgggaggctgaggcaggagaatcgcttgaacctgggaggcagaggttgcaatgagctgagatcacgccattgtattccagcctgggcaacaagagcaaaactccatctcaaaaaaaaaaaaaacaaagtgactgaaaatgagaaatgatgaggcaaaaggaggctgcttcaactcaccaatttatttgccaataattattttattgatactttttttattgttacaatgggaaagtaaggtgtcaaggatatagaaaggaagggcatgcatatgagggaacacagtatcattttagatcttagaaagcaatgagcatctgataagtctttggggaaataggaaaggaggaaaatctaataaagacaaagatcagcaaaagaaaaacaaagagaggctacaaaatgcagttatctacctggaattataagagaggggctaaatgtagtcatctcctctttttggagatcagaaggtctctgggaaaagagaagaaccaatttttcagaaaataactagggtcacagaatgaacaagtggaattagagagccagtgatggacgtgaggaaacagctgtgtaggttttgaccagtgagcaggtggtggtaatagtatcacagggttgctacttactgaatcactgctacaacatgcaaggaactgtgctagactttacagaatgattcctaatcattgaagcaaccctcacaaggtaggcattattatcatcccagtttcacagaggaggacatcgaggctaccaagttaagtagcttgtcctggtttcacagccagcaagtgacagggtcaagagagggacccacatcggccagacactgaagtcaggatgttttccacattcctacttccccatattacaaatttcacagagggtttaggtgagaatgacttggaagtttacaaagtcccagtgagggttaaagaacaacaaggagattcagatgtgagcaggatatttataagtgtcacaggaaaattattggatcctgcctcccaggatttctaggggatggaaagaagacagggattatggtgggaggtgattttgattggaggatttctttgagggagggaactggcagaaggagtcaggccctacggtggccctaggcagaaatccggtagttggggtggacctggggcctgacgtcgcagaccatgccaagaagctgggccaggacacgctctcggtttctctgctgggagctctgcatgccctgcacctggcgccttgtagcctgctccacctcagcagacaggttcccctgggagcccatggcctggggggtagggagaggggtggaagagagaaagggaaaagcaaaaacagacaagggtccaggcatatgaggggaaagatcctgaaacaaagcctagaagaaaggccctctcagaaaccacccccatcccacagaaatatcccaacaccaaagagatcaacacagtcccctttccccttagacctaacatgcaacttcatcctaaaacagaccgtaatatccccaccacctcaccatccatgaccataaaactctaccctccaccacaaatgttaatcatactccacatagatgttatactttacacagactgtggcattccgcccacaagctctatgtggccttcaaaactcccagactctcctacatatcatcacaaagtttcaccaatgttgtggtccctgccagggtcccctcagcctcagccctctgccaccatattttcttgttgagtcacccttacacacctcactagatgcacccaccaacttgcagtggggtctcatcccgactctgcctcaactcaccgcctgctgcttgctctggaattcgtgctctcgctctctgcggtattgctccacctccatctgtgcctcctcctttgcctgcttcagtcgccgggccttccctggaggcagaagaaaggacagtgagtggggatggacccacacacacacaatgtaatagcaggagtcagtcccttccagaaagttatacagccttctctcagccaaccaggtgccagattctaatatccatccatttcttccctcctaaccagcctccagaccctagctgtcttcccgccagccttgggttttcccaaaatgtttgctgtcccccacccccaattttctttccaaactcctaagggaggaaagaggagactcactctttctggcatctgccaccttctcagctgcccgcttctcagcttgcagaagctgctggataccttgggactgactggccatttctgttgttatggccgatgctgttttgaatgctgtcaaagtaccagatggctcccaccccccaccgcttacttctcctcctccagctcgttgctgcagtcctccactacccctgggtcttagtgctcccctgctcactcagcctcctgcaccgagtgtctctcccaatctcatcctcctattgatgactggtcctcctctccagcacttcttgctcaggcagtacccaaaggggccgcctgggagcagcagagaccaggcccaaagctgcgggcttacaacaggttagccatcccagtcggaaaggtctagggatgaggcaggggcggagacgggggagtactgaggtgagagaaggagaacttgattggtggtaacagaggaagcataaagggttgtgaatgcggtgaaaaggtaaggatgtcatcatgcaacctgtgttgggaaaagagcattctgggcttaattctaaactaactctctacctttctctctctctccaccatcccgccccctcccctgcctcccgttgttaacatctccatctttttctacatatttctcaagtccaaatttttgcatctcacttgccccatcctacgatagtcttcttccgtcttttgtctgtattttttcttttttttgatctgtccctgttgttgtcccactgtggtttttgtttttgttttccatgtttaatgtgatttttatcctgtctttatctcctctattttctctgtcttctcatcttttcgtccatcactgaaccatctcctctctctgccaagttagaggaggcgggaaaaaacctccaaataactctcttttctccctcccctcccctcgcctccttttcctcgcctccagtccagtcttctggtttcagacggcccctttaatttaagttccctagtttcccctgggagatctggccaagaactacccggtcggggcggaacgacatccggtaacgcccctcacagttcacttccgtcctccacctgcgtctctgcttgcgccatttcctccagcctggagtgtctccgcccttcccgcctcccgtctccgagcttcttaaacacaggccttgggcctacggctctgggggtacttgggggggcgggggcaggtctgatgagtaacccctccccccaggttccagaggaagaagcctccacatctgtctgccgggtacatgatattcaatttctagatcattattggagattatctgtgactttttaaaactcagatttctgctgataaaaattttccccatccggccctgttgggtttttttaaagttctttgttaaaaattaaaaatttacctgggctcctgagccttaaaccaattatttacccttttctcgaattttacattaaaaaaattaaacctctgatcctatcacccccctcaaaaaaaattttttttcaaatctatcatctgataaaggatcagggttaggttaggcctcatctcttgctgaagatattaaaaaaagacggaaccaaagggagaaacaacaggggatgtcagagatggagggagaaggaccagccaaggctgaagtcctgactgctgccttttttccttccccagcccaagagttccatggcctccacttcccgccgccaacgccgagaacgtcgctttcgtcgttacttgtctgcaggacggctggtccgggcccaggccctcctccagcgacacccaggcctcgatgtagatgctgggcagcccccaccactgcaccgggcctgtgcccgccacgatgcccctgccctgtgcctgctgcttcggctcggggctgaccctgcccaccaggaccgccatggggacacggcactgcatgctgctgcccgccagggcccagatggtgagtctgctcagtggggaacaaggtcataagcagctgaccagacctgaaatgaaagccaaccaatagttgagaaataagctggttatttggtcatcaggacctagggaaggagttaaccaagttggcatgtggctgtcatttgtccctttacattactgagctaccattgtctgaagaacccaacattccccaaagatcaactggtcttcaaatttcacatctgtttagattagtagctactttgtttcttgacagattgtttgctcgtagccaaaaagtagcatagaaggtaggctctggagttagattgcctggattcaaaccccagctccaaatcccagctccacacttcatagctacgtattcttggacaggttacttgaggcttagtttgcccatgtgtaaaaattaaaataataacaacctttgctatgtgccagacatttcttataaagtaacacatttaatcctcacaacaatcttaggaggtgagtactgatattatcccccatttcccagctgaggaaacagggcatagagaagtcatttgccagagttacagttattcactggtagagcagagattataacccagatggactagatagagtgtccatgcttttaacagctacattgtcctgtgttatacattatagcattgtacattgattgtgcccatgttcagagtacccatgttgtgccatatatgttttgagaatcaactgacatagtacataattagagtacctggcacacacgataagcacttggtatatgctggcgattgttgttcctgtttctctgttttttgtttttgtttttgttttttatgaagtttcactcttcttgcccaggctggaatgcaatggtgcgatcctggctcactgcaacctctacctcccaggttcaagtgattctcatgcgtcagcctcccaagtagctaggattacaggcgcatgccaccacgcccagctaatttttatatttttagaagagatgggttttcgccatgttggacaagctgatcttgaatgcctgacctcaggtgatccaccaacctcagcctctcaaagtgctgggattacaggtgtgagccaccacacctggccttgttcctgtttttgttatcaacaggtccatactcccttaaccacaattctaaactcaaaaacactctgagaaccaacatttttcatcaggctgccaccaaaattcatttggtgacagaaacctaatctgaactaaagtaagactattatttattttcatcctactgatgtcaatattcatacatttccctgcagaaacactcatgtgtttggttcttgggctgcctaggccctcctgggctacctaatatagagtgagtgtacttttaggtcagccctatcaagtcccaaaaacatttgaattctgcaaaacctttggcactgaaggattcaaatggggaacctggtgatattataatagtggtggaggccaggtgcggtgggtcatgcctgtaatcccagcactttgggaggccaaggcagtcagatcacgaggtcaggagttcgagaccagcctgaccaacatagtgaaacccccatctgtactaaaaatacaaaaattagccaggcatggtggcacacacctgtagtctcagctacttgggaggctgaggcaggagaatcacttgaacccggaagacagaggttgtggtgagccgagattgcactactgcattccaacctgggcaacacagcaagactccgtctcaaaaaaaaaaaaaagagtggtggaagcagctctttataggtagagccctgcttactagaataaaagctgaaaccttctttccccatctagagatttccttctggagtaagaacattacaggaaaacctctagatccagatgaacaaccctaacatcccccagctcaagtatagacagaaggcccctcccccaaaactcccccaaatggtcaaaaaaccccctatttaaaaatttcctttaacgtacctgagataggctagcatattcagatttgtttcttgttgtttttacttaaaacagagtaggtttactgagtgcaggcatctaacttgacagctcatattgtaagaggcaggaccctggaaggcaaaagagcggattaccccgaagcagacctgcatccagaccccagctctgccatcaacagggacatgcagcttacctctgtgagcccaatttgcctcgcaaaaatgggagttttgttttttgttttgttttgtttttttgagatggagtttccctgttgttgcccaggctagagtgcaatggcgcgatttcagcccacctcaacctctgcctcctgggttcaagagattctcctgcctcagcctcccaagtagctgggattacaggcatgcaccatcacgcccggctaattttgtatttttggtagagacggtttctccgtgttggtcaggctggtctcaaactcccgacctcaggtgacctgccagcctagcctcccaaagtgctgggattacaggcgtgagccaccgcgctcagccaaaatgcccctgatagtgtggtagggatttcctttattgtttgtttgcttgtttgttttgagacagggtctcattctgtctcccagcctggagtgcagtggtgcaatcatggctcactgcagcctctacctcgtgggctcaagcagtcctcccacctcagcctccctagtagctgggactacaagcacacaccaccatgcccagctaattgtttgtatttttggtagagactgttttgctatgttatccaggctgttctgcatctcctgagttcaaacagtctgcccacctcggcttcccaaagtgccgggactagaggcgtgagccaccacacccaactccattgtattgaattttaagaagctggtgagactgatattatcccatttacagatgaggaaagcagggcccaaaaggttcgggaacttgtctgaaatctcacagctctcaggtcattgtcttccaaagggggacccaagctcagtgccttcactcccagaccctggtgtcctctctggccttatttactcctggtcctctgccagccctgccaccagatggccttctaactccttggttgaaaggcccatctcattcagcttccagcttcctttttcttttccttttgagacggagtcttgctttgtcgcccaggctggagtgcagtggcatgatctcggctcactataacttctgcttcctgggttcaagcgattctcctgcttcagcctcccaagtagctgagattacaggcacacaccaccatgcccagctaatttttttatttttatttattaatttttaaatttttatttgtttatttatttttgagacggagtctccctctgttccccaggctggagtgcagtggcagtatcttgactcactgccacctccgcctcctgggttcaagtgattctccttcctcagcctcctgagtagccgggactacaggagcctgccaccatgcccgactaacttttgtatttttaatagagatggggtttcaccatgttggccagactgctctcgaactcctgaccttagatgatccacctgcctcggcctcccaaagtgctgggattacaggcatgagccaccatgcccgacctaatttttgtgtttttagtagagatggggtttcaacatgttggccaggctggtctcaaactcctgacctcaagtgatccacccacctcagcctcccaaaatgttgggattataggcatgagccaccgtgcccatcccacagaatgtcttttggttttgtttttgttttctgttttgttttgttttgttttgtttgaaaaggagtctcattctgtcgcccaggctggagtgcagtggcacaatctcggctcactgcaacctccacctcccaggttcaagagattctcctgcctcagcctcccaagtagctgggactataggcgtagggactgtaggcgtatgccaccacgcctggctaattttttgtatttttagtagacacggggtttcaccatgttagccaggatggtctcgatctcttgaccttgtgatctgctcacctcagcctcccaaagtgttgggattacaggcgtgagccacagcgcctggccaaaatgtttttatgtttatttttcttagtatgaaactccagcgtattaaagagcattgagaacggttgatctggtaaatcgctataaaggcggcatttctttttttttttttttttttttttttttggcgaagtgggggatggagtctcattctgtcgcccaagctggagtgcagtagtgtgatctcggctcactgcaagctccgcttcccaggttcaagccattctcctgcctcagcctcccaagtagctgggattacaggcgcccgccaccacgcccagctaattttttgtatttttagtagagacagggtttcactgtgttggccaggctggtctcgaactcctgacctcatgatccgcccgcctcggcctcccaaaatgctgggattagaggcgtgagccaccgcgccaggcctaaagggggcatttctaatactggagaaaggtgaacttttttttttttttttttccgagacagagtctcgctgtgtcacccaggctggagtgcaatggcgcaatctcagcttgctacaacctccgcctcccgggttcaagcaattctcctgcctcagcctcctgagtagctgggcacctgccatcatgcccagctaatttttgtatttttgtagagatgggggtttcaccgtgttggccaggctggtcttaaactcctgtcctgacctgaggtgatccacccacctcagcttcccaaagtgctgggattacaggcatgagccactgtgcctgaccaggtgaactattttataaataatattggaacatttggctcatctagggaaaaacaagagtcccacctcacacctaatcaaaaagtaaattccagcagattaaatacctgaatatgacaggaaggtacacaccaaattcatgggacagatggcctggggaggaatgaaacttggaaggcggtatcacggtaaactacctttatctgtgatgattttatttccttaaaataaattatactacaaacatgacagtacattaacaaaccctgtggtaggaatggggttgtgtattgtattatactttgtatttttgagagttttttaatttcttttttgttgttgttgagacagagtctcactctgtcacccaggctggagtccagtcgcgcaatcttggctcactgcaacctctgcctcccgggttcaagcagttctctgcctcagcctcccaagtagctgggattacaggcatccgccaccacgtcaggctaatttttgtatttttagtggagacggggtttcaccatcttggccagactggtcttgaactcctgacctcatgatccacccaccttgggctcccagagtgctgggattacaggcatgagccaccgcgcctggccgagttttttaatttctaaaaataaaaatgagtatacatctaaagtagtagaagaaaatgcagagaatgttttataatcttaaaatagagccttcctaagagtgaagtgaaataaaaagtcagaaaataatatattgatatagatttaactacatgaaaattttaggccgggtgcgatagctcacacctgtaatcccacactttgggatgccaaggtaggcagatcacttgagccaggagttcaagaccagcctgaacaacacagtgagacctggtctgtacaaaaaatacaaaattagccaggcgtggtggtacgtggctgtcgtcctgtagtcccagttactcaggaggctgaggtgggaggatcgcttgagcccaggtggggcagagtttgcagtgagcaagatcatgccaccgcactgcagcctgggcaacagggtgagaccttgtctcaaaaagaaaaaaaaagcttttttaaagatagatagaagaaaatgtttgcaatatgtataacacatacagtatatagaaccctcatatcaatatatataatttccaaagaaaaagtggataaagaatatgagcaattcattcacaaaaaatacaaatagccaaaagacatgaaaaagaaaaaaacattgttaataaaataattttttaatctatccaactggcaaaattaaaagggttgatgatattcaattttggtaaaggaagacataggcacacttgtatattggcacaaacttattgagagcagtttgaccaaattgcgcatgtcctttgactcagaaattccacttatgaaaatctacccccacagaaagactgtaagatactcatgaggctgaacattttttgaaacaaagtctatcgatattggggtaaggagatttgttttgtacacacagtggaacactaattataaagtcgtcaaaaagtatgaggtagactgtatatattcctgtggaaaaatataaatgagatgttaaatgaaagaagcaagttgccaagcaatatttgtagtatggttacatatctccaaataaatgtgtcatatgtatgcttttaggtacaccaaggtgggactggaagggatcacagtacactgttaatagttatcaaatttgttcgtccttctttaaaaagaaaatttcaacttaattatatccctttcacattaaaatgtcaaataaaattgggggaaaagccacctacagccccaccacccataggctagaatttttacatattttttgccagtctattttttttctttttttttttttttttttgagatgggagtctccctctgttgcccaggctggagtgcactggcatgatctcagctcactgcaacctctgccttccaggttcaagtgattctcctgactcagcctcccaagtagctgggattacaggcacatgctaccacgcctggctaatttttgtatttttagtagagacagggtttcaccatgttggccaggctggtctcgaactcctgacctcaggtgatccacccgcctcagcctcccaaagtgctgggattacaggccatgagccaccacgcccggcctctttttttccaaccataggatttggtctcttgttttagacagttattatctgatcctctctctctctctcttttttttttttttttttttttttgagatagagtctcaccctgtcacccaggctggaatgcagaggcgcgatctcggctcactgcaacctccgcctcccaggttcaagcagttctctgcctcaacctcccaagtagctgggattacaggcgtcagccaccacgcctggctaattttatatataatataaaatataattatatatatattttgtttgtttgttttagtaaagacgggttttcaccatcttggccaggctggtattgaactcctgaccttgtgatccattgtcccccccccccagcctcccaaagtgctgggattacaggcgtgagccaccgtgcctggccacatctgatcctctctacagttttgtagccagcttttttcaaacacatgcctcagttgtagtggctgtttaatattatgtttttatagttggaggccctactccttaaaacctatgaatgtaaacctcccatgcaagcctgagcactcaccatgctcaccacctgagctcaggtggggaacaagcgaatgagagacaggaccaggtactttctgggtgggacaagttgagagggtctgtgacaggtcacagcagcactagggagaagtgcccccccccaccaaccctgatgtgatttgggtagggatggtgggccttcgccagccacacctgggccattctgtcttcttgccttcctggccttgccttcccctattccagctttctgccaggtaaacagtactttccagcactaccaaataaagatttaaggactgctagcccatttcctcttaccccggggaaagaaagtaggtccacaggaaggaaggctgcctccctccccttcttctatcccccaagtgaaagaggtggttggtggccacagcaggtgggcctggccaggatgcctgggttggcagtgaaggaagtagcatggcactcagctaaccttgggccagatgcagcaaggttgggactgaagaaaaggggagttcaggaacgtcggttcctctcctgttttctctcagcccatgggtgagaccctctgtcacactccactccctttcccctgccctaggtcagcagtcatttggaaagagcttgctctgccgccggccatagttgttgccggttcacctccccacccctctcccatcatcccctggtaaggctggctgagagaaattcccctgaaaacatttattttactcagtttattgataagtgataataaaagataagtattacatatttgtgtatttattaatggcccagagtagagcattcagatattttcccagtctgatatatggtttcaggtgagaaaataagggatttatatagtgacaatatttttaagtgaaaagtggaatacatagtcaaagaatttgggcactgccttggtggctggaggcaggtcagaaaatgtcagttggcatggtagaacttctaggatgctgaaatagtttgtggagacacaagtaagaattttttttttttttttttgagacggagtcttgctctgtcacctaggctggagtgcagtggcacgatctcggcttactacaagctccacctcccgggttcacatcattctcctgcctcagcctgccgagtagctgggactgcaggcgcccgccaccaggcctggctaattttttgtattttttagtagagatgggatttcaccatgttagccaggatggtcgtgatctcctgacctcgtgatccgcccgcctcggactcccaaagtgctgggattacaggcgtgagccaccgcgcctggccgagaatattttaaactaccacacttaccatgcatgtggtaaactatcagtctgtatttatcagtgatggttatttcctaatacccaggaggcatccatgtgagccacccttccattgctttaagaccaagggagtgagtgaccagcaggattcaagatggcagctctgccgaggagtgggagtcccagctaacttctgctccctgctctcccaccaacagcctacaccgatttcttcctcccgctgctaagccgctgtccctccgccatgggaataaagaataaggatggggagacccctggccaaattttgggctggggacccccctgggattctgctgaagaggaggaagaagatgatgcctccaaggagcgggaatggagacagaagctccagggtgagctggaggacgagtggcaggaagtcatggggaggtttgaaggtgagaagtccactgctatccacagctgcccttccccactggctgctttccatctgcatgaatgcgtcacactaggctcctctgccccctcctctgtgcttccctgcttcttggggcccatcaccttctcacagcctctctccaactacccccatcccaccctcccaaacaggtgatgcctcccatgaaacccaggaacctgagtccttctcagcctggtcagatcgcctggcccgggaacatgcccagaagtgccagcagcagcagcgagaagcagagggatcctgtcgacccccacgtgctgagggctccagccagagctggcgacagcaggaggaggagcagcggctcttcagggagcgagcccgggccaaggaggaagagctgcgtgagagccgagccaggagggcgcaggaggctctaggggaccgagaacccaagccaaccagggccgggcccagggaagagcaccccagaggagcggggaggggcagcctctggcgatttggtgatgtgccctggccctgccctgggggaggggacccagaggccatggctgcagccctggtggccaggggcccccctttggaggaacagggggctctgaggaggtacttgagggtccagcaggtccgctggcaccctgaccgcttcctgcagcgattccgaagccagattgagacctgggagctgggccgtgtgatgggagcagtgacagccctttctcaggccctgaatcgccatgcagaggccctcaagtgaccctagggaagaagcaagaaacttcggggctgcagcctcaggatgaggcagaaggaagggtaagggaaaggatggggaccacaaggaagagccaggtgctgctcagcagaggatatgggtgggagcgaaagttgtaacaagtgggggtggggggtgcgggccgccaccactgctccttgactctgccgtttcctaataagacctggttccacatctcactcccagtgtctcctctgtctttttccattgctgtggttttcatcacccatgacatctcctttcccgccccgcctgctgaaacccacagctcccacacacctgcaacacacacgcacacgctaacacgggctctgagctggaggcaagaagcctctgcatgccccctcagttcagccctaagaaggcccagtttgccatccagtctcactccactccctacactggggtcttgtccaccctgcaatctgtggctggagaaatagatgcgaacagaggcaaaaaggggaacaaaaccagtttccctcccctccctggctccccaagctgaaccacatcctcctccccacttaacacccccttcccccaacacagggctttccctttgctgagtcactgaatgagcgagttgggggtagccggcgctggggggccatgaggaggctgggggaggatggggaatacaagcagaatggctggaggaagagccctgtgggggagtggaatttcagttgctaaaattaggagcaggggaaggaggtggaaagagcaaaattatgtaacatgggttgtctgttcttgggcaactggagctccacacccaaagccagccaggctgctggctccatccatctctgccctctagcttgtcagttgtatctctcttcctccagggccccaatcctcatctccgccattcagctgctgccccatcctaaacctgagttcatctctgggcagcccaggcatggccttccctataaacatttccttttccaagaaccagtagttgaagtcctgagaggtggagggagagtctgggattcccacggaggagagaggggggctccctggaaactaagataggtagaccccactaccatcgcccaggacacaactgggaacttggcaaaaagaaaggacagggctgcaaggagagtacagacatgtgctggtgagtgcactgtctgcatagttacaccagagcatcttatcaatcagaaacttatctttcaggttttgagcccagttctctacaggagaatcccaggagtggaagtggaaggcagtagaagacagggagggcacgcctctgggaacacgggaacatgggtgggcatgagatccttgaataagacagcctgaagttcggaagagaccaaggcctctgaaggaccaggcagatgttcagggtgcaggagggggaagggctggtgagaaagatcctgtgagaggaagctgctgtgattcagagaagagacttcaagctgtgtgtgaccctggcgtccggttcctctcacaggctggagcttttcggaagtggcatgcaaagagtccaggtttggccttggggggagttggggttaggatccctaagctggaggttgagaagtaaattacagaaaactctggtgaccaaatttgctcctccacccaggagatttctcactggtttttaagcacatcatttccccttctgcaagagttacataaaaccaaagcaaaataagccctgaaacctgggcccaccggaccacagtcttttcaacgtcccttcctggtgtctggcccccagccctggtgggggttcccctgagataagggctgttcactttctctgaccacatggtttccgcttctgtgtctcttgtttcctaggctgataaaaatactgagccctagaggccctggcttcctctgaccccttggggcaggcagcaggcatcctgtccagcatggtgggggcagggacaggggccagggattcccaaggggtgactcagtgcctgccatgaaacagtgggtaggtggaagtgtatctctgctctctagagctggcaccaggagttgagtctcagtggaggatgcattgggattcaattggaggaacaggcctggaaaagaataatgagattgaagagggtcagtttgaggactcaggttggggcaggtttggattaagttaggaaaaggatctgggagggactctgttcagtgtaggtcaactgagcattatgtagcccaaagataaatttaaaccctgcttcaagcttacaatctagtggggaggcagacccatacctagttaactgattcaaggcatgatgagtaaactttaagatgattacagaaagaggggagattaagtccatttgaaagcatccagggagcctctgaggagacagcatttgaacttgctctaatgaatgggttcactaggtggaggtggatggaaaggttccataggcgaataacacgtcttgagcgagcctgacaagtcagaaaatgcagtatgttctgggaaaggagcgtcctgagggagaagaagcacaggtgtgagggaacatgtgatgaagaaaggaccacagaaagtcaaggtcagagattggactgcatcctgtgggcagtggtccaggtgacgatgaaaaagagggagaacaggtgagtgctgcagtacagacaaggagtaagaaaacggccatcatcttgtgaattaatacctactgtgtgttaaccagcccttttcctaacaccacaaatcctctcaacgtctgtccaaaaggtgggtggtggtggccaggcacctcactcctgtaatcacagcactttgggaggccaaggtgggagcactttgggaggatcacttgaggccaggagttcgagaccagcctggccaacatggtgaaaccccgtctctactaaaaatataaaaactagctgggtgtggtcttgggcacctgtaatcccagctactcaggtatctgaggcacaagaatcacttgaacccgggaggcagaggttgcagtgagctgagatcatgcctctgctctccagtctgggtgacagagcaagactctgtatccaaaaaaaaaaaaaattattaagcacctattaggagcagggcactgcttgacaataggtataaataataaagtcactgccttcatagaacttgcagtctaatgagacagtatacaaataataactatacattatagttataatgtataggtatgcctgcttagggtaataaagtgctcaatgaaggtttgaggtaccagcatgactctcaggtggagatttccagaaagcaggtctggagctcaagagaagttgggtctggaggaacagatttgggcatcattcccttcccagtagaggttgagcctttgagtggacaggatcttcaagggagggggcggagtgaccagaagagccctgagcatgatcaaaggaagagaaccaataaaggagaggttggggagcagtcagagaagcagggcacggggggcgggggatgccaagcagagacagggcagccatgtttgaggcttcaaagaggtctagtaaatgagggttgaaaagattgttgggttcaggaactagacgattacaaattttgagaaaaccgtttccatttaatagaggggcagaaatcactttacataggttgaggaatgagtgggaggtgaggaaaaggaggtggtgggcatgaggtcagaatggtgaacacagaataactgagaatcatctcttagttctacccacagattttacagttgagggaaattttaccagttcctgaaaaagtggttcgttaagggggctagtcttttgagacatcacacgaaaacggaaggtgagatagactggacatttgagggagaaatattccaaggaaggatcttttttgttgtttattttcaagaaataaaattgaaggtaaaatgaagatgcttaaagagacaaagataggccaggtgcagtggctcacacctgtaatcccagcactgtgggaggccaaggtgggcagatcacttgaggccaggggttcaagactagtatggccaacatggcaaaaccgcatctctacgaaagatacaaaaattagccaggcgtggtggcacatgcctgtggtcccagctattcactgaggtgggagaatcgcttgaactcaggaggcagagggtgcagtgagccgagatcacaccactgcactccagcctgggtgacagagcgagactcagtctcaaaaaaaaaaaaaaaaaaagcccaggtgcggtggctcacccttgtaatcccagcgctttgggaggctgaggtgggcagactatagatatcaggagttcaaaaccaacctagccaacatagtgaaatgctgtctttactaaaaatacaaaaattagctgggcgtggtggcacacgcctgtaaccccagctactcaggaggctgaggcaggagaatcacttgaacccgagaggtagaggttgcagtgagccgagatcgcgccactgcactccagcctgggcaacagagcaagcctatcccaaaaacaaacaagaaagggagagatagtgaaaacataagcaagaagtggggagagaatatagtaaagatagaggaagtgggatagagtacagataaaaggatcagtcttggaaacaagaaaaagtactgtgagtcagtatgtaaggaaagattaaatataacaaaattaaggaaaaagagggaagtgagatccacacttgatggccttaagctcaatgaaatattaatagatgagagtgaagaacatcagaggcacggagatttagaacatcacgcacagtagtataatggggagtcaacaaagaatgagtaaaagttgtgtccaagaacactgatgactctctgagattagctggccaggattagttataggcctcttatggtgactcagctgtctactgcagcgcttggcagcctaagacaaagccccaagaatgagaccacttagtttacccaagtcaatttttgagacagagtttcactcttgttgcccaggctggagtgcaatggctcaatcttggttccctgcaacctctgcctcccgggttcaagcgattctcctccctcagcctccagagtagctgggattacagttgcccaccatcacgcccagctaatttttgtatttttagtagagatggggcttcaccacattggccgggctggtctcgaactcctgacctcaggtgatccgcccaccttggcctcccaaagtgctgggattacaggtgtgagctacggtgcccggcggtaagagattctaaaatgcagacaaagtggagttgaaattgttgaccatgcagtacatgttaaatcaacaagcaaaaccaggaaagcagaagcagccggaagtcttggtaagaataaagaactgattcaaggggaggcagagagtgggagatgtgaaaagtgagtggttgtgatgagaagggtaattcagagatcaagatcttgaaggcataattcttccaagtgatgctggggtttgaggtacaaccttactcctgggtggctaaaatggaggagggaagaagaggctgtaaaaccagtagacttgagaaacttggagaattgagaggccagactgtaagactcatctgatctgtgtggcttctttttttatttttatttttttcctctgagacgaagtctcgctctgtcacccaggctggagtgcagtggtgtgatctgggctcactgcaagatccgcctcccgggttaatgccattctctcgcctcagccttccgagtagctggggctacaggcacccaccaccacgcccagctaattttgtttttgtatttttagtagagacggggtttcaccttgttagccaggatggtctcgatctcctgacctcgtgagccacccgcctcagcctcccaaagtgctgggattacaagtgtgagccactgcgcccagccgatctttgtggcttttaaagtcactaaagatggtggtaggaggccgggtgcggtgggtcatgcctgtaatcccagcactttgggaggctgaggcgggtggattgcttgagctcaggagttcaagaccagcctaggcaacatagcaaaaccctatctctggaaaaaaaaaaaaaatacaaaacttagccgggcacggtggtatgcgcctgtagtcctagctactcaggaggctgacgtgggaggatcacttgagcccaggaggtcgaggctgcagtgagccaagatcacgccactgcactccagcctgggtgacagagcaataccttgtctcaaaaaacaaacaaacaaggatgatggtagggataagatgtggagaaagactgagctagttatacaagttgttaagagcataataaatattttgatggataagattgtgctgtgaagacaggaagagcatggcaaatgcaaaaggcacgtgctttgggagatgaggaggagtttatcagtggtctgggggagagaaaataacgacccctctcttctgccttcattcccctagtgatggaggtcgaagaaagagcaaccttcaccacagagaggagtagcatcattaggggaaagccaggtttcaaaatgcccagaggaaaatgctttcaaacatagaagacaggatttgaaaatgtgaagagttccaccaaatattgtgaaatggattggtagaagggtccttgtggggtagggaattgaatccagggaggttaaatcccagtgggaattcagaagactaagtctggagagtttagcttctaggagcaggaggttgttgcctctggaattcagaatggaagatgcactgcatccattgtgaggggaaacaagtgcctcaaaggggtcttatagggatgcacaagataagttccatggctttaaacaccatcctcatgctgaccatgcccaggtttctttctctagcttggaccttgcccctgaaatccagatgtgtatctgcccagtggcatctctacttgcatgtctaatagacttagacttaccacacccaaaatagaattttttagtttttccatccatcagaatcctgcttctctcccagtatctacatctcccacccatcaatccatcatctagtcctgttgtttctacccctggaatgtataatatatcccaaacttgtctacttctctccatctccatggctgccactattttctcttcaccatcaatgccactgccacctgtctcctaccagccagcctaaacacaggagccacagtgatcttttaaaaacaagtccaggctgggcgcgttggctatgcctataatcccagcactttgggaggccgaggtgggtggatcacgaggtcaggagttcaagaccagcctgcccaacatgatgaaaccctatctctactaaaaataccaaaattagccaggcacggtggcgcatgcctgtaatcccagctactcggggggccgaggcaagagaatcacttgaacctgggaggtggaagttgcagtgagccaagatcatgccgtagcactccaacctgggcaacagagcgagacgccatctcaaaaaaaaaaaaaagtccaggcaagactcagtggctcatgcctgtaatcccaacactttgcgaggctaaggtgcaaggattgcctgaggccaagagttgaaggctgcagtgagctatgatggtgccattgcactccaacctgggcagaaaagtgagactccatctcttagaaaaaaaaaaccaggccgggtgcagtggcacatgtctgtaattccagcacttcgggaggctgaggcaggcggatcacttgaagtcaggagttcaagaccagcctggccaacatggtgtactttctatactaaaagtacaaaaattagccaggcatggtgacatgcacctataatcccagctacttgggagactgacataggtggattgcttaaacctgggaggcagaggttgcagtgagccgagattgtgccactgcactccagcctgggtgacagagcgattctgtcttaaaagaaaaaaaaaaaaaaaaaaggctgggtgcggtgtctcacgcctgtaatcccagcactttgggaggccgacgcaagtggatcacctgaggtcaggagttcgagaccagcctggccaagatggtgtactttctctactaaaagtacaaaaattagccaggcatggtggcatgcacctataatcccagctactcaggaggctaagacaggagaatcgtttgaacccgggcagcagaggttgcagtgagctgagattacgccattgcactccagcctgggcaacagagtgagactccgtctccaaaaaaaagaaagaaaaaaaatccagggccagtgtggtgactcatgcctgtaatcccaaaactttgggaggctggcccagcatggtggctcacacctgtaatcccaaaactttgggaggctgaggcaggcggatcacctgaggtcaggagtttgagatcagcctgactaacatggtgaaaccccatctctactaaatacaaaaaattagccgggaatggtggcatgcacctgtaatcccagctacttgggaggctgaagcaggagaatcgcttgaacccaggaggcagaggttgcagtgagatgagatcagtcattgcactccagcctgggcaacgagcgaaaccgcctctcaaacaaacaaaaaaaaactttgggaggccaagatgggcagatcacttgaaaccaggagttcgagaccagcctgagcagcatagaccctgtctcaacaaaaattttaaaatattttttaaaattagccaggcacagtggcacacacctgtagtcctagatacttgggaagctgaggtggaaggatgacttgagcccatggttttgaggttgcagtgggctatgatggtgccactgcactccagcctaggccacagagcaagacaccatgtcaaaagaaaaaaaaatccaatcacctctgctcacctccctctttctctctctctctctctctccctccccctctctcccctgcaacacacacacacacacacacacacacgcacgcatgcacgcaccacacactctgacgacctttaaaggcttcctgtggctggatgaaatctagaggctttacccttcttgcatggccctgcatgacctggcccctgccctcctctctgacctcatctcccacccgcctcccagtctctctctctgctccagccacactggccttctgtttgtcgtcaacacccccagcttggttccgccttccagcctttgcagtagctgctccctttacctgaaatgctttgctcccaaacttttacctggtcactattttttgtcatttgggtctcagctccagtgccacccaaacactcaaagaggattttgctgactactgtatttaaaagtagctccctgccactcttacaacatcagcctgtcttattttctcatagtaccaatttcttcttcagtttctttcttttccgtctggcctcactggaatacaagctccacaggtgctggtaccttctctgatccctttgcctccatgtccctcctgccttaggacaatgcccagcatgtgttaggcacgcagatactcactaaatggaggaatggatgaataattcataaagcaggataaagttcaactttaggcttgtggctcagattggacttacatttagagtcagatttaagtttagtgttaggagtggtggtaaactggtttcaagattagccctagaaacagggttgggttggggtagaggagaagttttatttagggggttattaattgggatgtgtttagatttaaggttagggttacagttggggttgagtttgagttgtgatttgggttgaggttaaatttgggttagggttgatgttggtattaaatcccaattcaggttttgaggctaagttcaagtttgaagctaatgtcatttcagtctcatttggaggcttcagagatttcactagtttctccacaaagaccactataaagactgtatttccctgagtctggggcacaagactccagtcatcagctctcccacccagggaaagtcccaaaccaactgctggcctgcccaagaaagaaaccaaattcatacaacctccgaaactgagattgaaaccaagattggcccatctcaaggagcatccttcgcatatctcacatgcacgtgacactgagcctcagcccagtcttacccttccttcctctgtgtctctcatgtctccccatcacccttcttgccttcccttttttgtctttcaatgtcccattcttcctctttaatttaaatttctctctgtgtctcactgttaattgcaatacctttttttgtttgcttgttttgttttgttttgttttttggtttgtttgtttgaaatggagtctcactttgttgcccaggctggagggcagtggcacgatctcggctcactgcaacctccgcctcctgggttcaagcagttctcctgcctcagcttccctagtagctaggattacaggcgcgtgccaccatgctcggctaattttttgtatttttagcagtgatggagtttcaccgtattagccaggattgtctctatctcctgaccttgtgatctgctcgcctcagcctcccaaagtgctgggatgacaggcatgtgccactgctcctggccttgtaataacattttatattttaatatagctcagctggggtcccagtccatcagctcataccattagagaagcagaaagagacaacaggaagcaaaaaggaccctgagagaaagggcaacacagagaaaaagaaaggagcaggggctaaaagggaaacccacactgacacaagagataataaggttaaaagaatgagaagaaggttgggcgcagtggctcacgcccataatcccagcactttgggaggccaaggctggtgggtcacctgtggtcaggaattcaagaccaacctggccaacatggtgagaccccgtctctactaaaaatacaaaaaaaaatttggcgggcttggtggcgtgtgcctgtaatcccagctactcgggaggctgaggcaggagaatagcttgaacctgggaggcagaggttgcagtgagccaagatcgtgccactgcactccagcctgtgcgacagtgagaaactgtctcaaaaaaaaaaaaaggaaaagaaattttctgacctatctcatctgatagtaggttataagaccctcattccagaagaggttctgccctatacctgggaggaaggaatgctgtacagagagaccaagaagaatatggccaggccttgctgggatccccccagtcccagtctgtgaccattagatgatactccttttgttcaattacatttctgcacagctgttcattcttcatcaaatctaagcataaaaatagttttcccctgggtccttgggtcttcatttctgaaggctcccatgtcacctaaaactttgattaaataaatgtattatgcttttctcttgttaatctgtcttttattataggagtattggccataacccttatgatgggtcaggaagggatcacccctttctgcccctacagaaataatagctaagactagtaaagcataaaaggcaaaggggcaggtcctcaagtagagaagaacaggagaaatagctcatacacacccagaatgttacttacatgtccctccatgttacaccaagacccctcagggaccttgtgcctggggagagaagtggtctgccccatgcaacagtgggctttaccccgggtcaccaccagccccagctccaacccctctaacactctccaagtaaaatcacatcagtagcagtaataatatttgaggtgacaagttggtattatctcaaacttaggaaaagtgaataaagtcatctttagaaactgctttttttaaaccttgtaacttgcaagctaagtgaaaatgggctcatgtatgagaatgttcgtgttagacattttttgtgttagacaaaaactagaaacaaaccaaatccccatcaacagaatatattagaatatattgatacaatagaatattacatcataatttttttaaaaaacattactgatacatacaaccacgtatatgaatctcacaaacataatgctgactgaaagaagtcaaacagaaatgagtacattctgtgtgatttcatttatatgatgccccaaaccaggaggaaataatctatggtgataaaagtgagagagtggttggttatctttggagggtatcagcagggagggggcatgagggaacctgctggggacctgaaaatacgtggagctgggtggtggctacatacagatggaaaaattcatcagctgtacacttaagaggtgtccacctcatacctaagttacatatcaataaaaaggaaaaaaattttggaaacttttttttttttttttgagacagagtcttgctctgtcccccaggctggaatacagtggtgcgatcttgactcactgcagcctccgcctcccaggttcaaataattctccagcctcagcctcccgagtagctgggactgcagatgcgcaccagcacgcctggctaatttttgtatttattatagagatggggtttcaccatgttggccagctggtctcaaactcctgacctcaagtaatccgcccacctcagactcccaaagtgccaggattacaggtgtgagccactgcaccaggcctggaacaattttaaaataatgtattggctctgcaaatgcagcttcagaacaagtcccttagctgtccccaccccaccctaagtcaccacccttaagcctcacccatgtggaattctgaaacttcctttgtagaaaactttggaaggtgtctgccacattgatcctggaatgtgtgtttatttggggttatataaatctgttctgtggaagccacctgaagtcaggaagagatggagggcatccttcaggagtgagatgagacctcatcatacttgactgtccagcatcatctctgagtaaggggaccaaaaaatttatcttccaaactaggacactttcaagagtggaagggggatccattaatattttcacctggacaagaggcaaacaccagaatgtccccgatgaaggggatatataatggaccttcttgatgtgaaacctgccagatgggctggaaagtccgtatactgggacaagtatgatttgagttgtttgggacaaggacaggggtacaagagaaggaaatgggcaaagagagaagcctgtactcagccaagggtgcagagatgttatatatgattgctcttcagggaaccgggcctccagctcacaccccagctgctcaaccgcctcctctctgaattgactgtcccttctttggaactctaggcctgaccccactccctggccctcccagcccacgattcccctgacccgactccctttcccagaactcagtcgcctgaacccccagcctgtggttctctcctaggcctcagcctttcctgcctttgactgaaacagcagtatcttctaagccctgggggcttccccgggccccagccccgacctagaacccgcccgctgcctgccacgctgccactgccgcttcctctataaagggacctgagcgtccgggcccaggggctccacacagcaggtgaggctctcctgccccatctccttgggctgcccgtgcttcgtgctttggactaccgccccgcagtgtcctgccctctgcctgggcctcggtccctcctgcacctgctgcctggatccccggcctgcctgggcctgggccttggtgggtttggttttggtttccttctctgtctctgactctccatctgtcagtctcattgtctctgtcacacattctctgtttctgccatggttcctctctgttcccttcctgtctctctctgtctccctctgctcaccttggggtttctctgactgcatcttgtccccttctctgtcgatctctctctcgggggtcggggggtgctgtctcccagggcgggaggtctgtcttccgccgcgtgccccgccccgctcactgtctctctctctctctctctttctctgcaggttctccccatgacaccacctgaacgtctcttcctcccaagggtgtgtggcaccaccctacacctcctccttctggggctgctgctggttctgctgcctggggcccaggtgaggcagcaggagaatgggggctgctggggtggctcagccaaaccttgagccctagagcccccctcaactctgttctcccctaggggctccctggtgttggcctcacaccttcagctgcccagactgcccgtcagcaccccaagatgcatcttgcccacagcaacctcaaacctgctgctcacctcattggtaaacatccacctgacctcccagacatgtccccaccagctctcctcctacccctgcctcaggaacccaagcatccacccctctcccccaacttcccccacgctaaaaaaaacagagggagcccactcctatgcctccccctgccatcccccaggaactcagttgttcagtgcccacttcctcagggattgagacctctgatccagacccctgatctcccacccccatcccctatggctcttcctaggagaccccagcaagcagaactcactgctctggagagcaaacacggaccgtgccttcctccaggatggtttctccttgagcaacaattctctcctggtccccaccagtggcatctacttcgtctactcccaggtggtcttctctgggaaagcctactctcccaaggccacctcctccccactctacctggcccatgaggtccagctcttctcctcccagtaccccttccatgtgcctctcctcagctcccagaagatggtgtatccagggctgcaggaaccctggctgcactcgatgtaccacggggctgcgttccagctcacccagggagaccagctatccacccacacagatggcatcccccacctagtcctcagccctagtactgtcttctttggagccttcgctctgtagaacttggaaaaatccagaaagaaaaaataattgatttcaagaccttctccccattctgcctccattctgaccatttcaggggtcgtcaccacctctcctttggccattccaacagctcaagtcttccctgatcaagtcaccggagctttcaaagaaggaattctaggcatcccaggggaccacacctccctgaaccatccctgatgtctgtctggctgaggatttcaagcctgcctaggaattcccagcccaaagctgttggtctgtcccaccagctaggtggggcctagatccacacacagaggaagagcaggcacatggaggagcttgggggatgactagaggcagggaggggactatttatgaaggcaaaaaaattaaattatttatttatggaggatggagagaggggaataatagaagaacatccaaggagaaacagagacaggcccaagagatgaagagtgagagggcatgcgcacaaggctgaccaagagagaaagaagtaggcatgagggatcacagggccccagaaggcagggaaaggctctgaaagccagctgccgaccagagccccacacggaggcatctgcaccctcgatgaagcccaataaacctcttttctctgaaatgctgtctgcttgtgtgtgtgtgtctgggagtgagaacttcccagtctatctaaggaatggagggagggacagagggctcaaagggagcaagagctgtggggagaacaaaaggataagggctcagagagcttcagggatatgtgatggactcaccaggtgaggccgccagactgctgcaggggaagcaaaggagaagctgagaagatgaaggaaaagtcagggtctggaggggcgggggtcagggagctcctgggagatatggccacatgtagcggctctgaggaatgggttacaggagacctctggggagatgtgaccacagcaatgggtaggagaatgtccagggctatggaagtcgagtatggggacccccccttaacgaagacagggccatgtagagggccccagggagtgaaagagcctccaggacctccaggtatggaatacaggggacgtttaagaagatatggccacacactggggccctgagaagtgagagcttcatgaaaaaaatcagggaccccagagttccttggaagccaagactgaaaccagcattatgagtctccgggtcagaatgaaagaagaaggcctgccccagtggggtctgtgaattcccgggggtgatttcactccccggggctgtcccaggcttgtccctgctacccccacccagcctttcctgaggcctcaagcctgccaccaagcccccagctccttctccccgcagggacccaaacacaggcctcaggactcaacacagcttttccctccaaccccgttttctctccctcaaggactcagctttctgaagcccctcccagttctagttctatctttttcctgcatcctgtctggaagttagaaggaaacagaccacagacctggtccccaaaagaaatggaggcaataggttttgaggggcatggggacggggttcagcctccagggtcctacacacaaatcagtcagtggcccagaagacccccctcggaatcggagcagggaggatggggagtgtgaggggtatccttgatgcttgtgtgtccccaactttccaaatccccgcccccgcgatggagaagaaaccgagacagaaggtgcagggcccactaccgcttcctccagatgagctcatgggtttctccaccaaggaagttttccgctggttgaatgattctttccccgccctcctctcgccccagggacatataaaggcagttgttggcacacccagccagcagacgctccctcagcaaggacagcagaggaccagctaagagggagagaagcaactacagaccccccctgaaaacaaccctcagacgccacatcccctgacaagctgccaggcaggttctcttcctctcacatactgacccacggctccaccctctctcccctggaaaggacaccatgagcactgaaagcatgatccgggacgtggagctggccgaggaggcgctccccaagaagacaggggggccccagggctccaggcggtgcttgttcctcagcctcttctccttcctgatcgtggcaggcgccaccacgctcttctgcctgctgcactttggagtgatcggcccccagagggaagaggtgagtgcctggccagccttcatccactctcccacccaaggggaaatggagacgcaagagagggagagagatgggatgggtgaaagatgtgcgctgatagggagggatggagagaaaaaaacgtggagaaagacggggatgcagaaagagatgtggcaagagatggggaagagagagagagaaagatggagagacaggatgtctggcacatggaaggtgctcactaagtgtgtatggagtgaatgaatgaatgaatgaatgaacaagcagatatataaataagatatggagacagatgtggggtgtgagaagagagatgggggaagaaacaagtgatatgaataaagatggtgagacagaaagagcgggaaatatgacagctaaggagagagatgggggagataaggagagaagaagatagggtgtctggcacacagaagacactcagggaaagagctgttgaatgcctggaaggtgaatacacagatgaatggagagagaaaaccagacacctcagggctaagagcgcaggccagacaggcagccagctgttcctcctttaagggtgactccctcgatgttaaccattctccttctccccaacagttccccagggacctctctctaatcagccctctggcccaggcagtcagtaagtgtctccaaacctctttcctaattctgggtttgggtttgggggtagggttagtaccggtatggaagcagtgggggaaatttaaagttttggtcttgggggaggatggatggaggtgaaagtaggggggtattttctaggaagtttaagggtctcagctttttcttttctctctcctcttcaggatcatcttctcgaaccccgagtgacaagcctgtagcccatgttgtaggtaagagctctgaggatgtgtcttggaacttggagggctaggatttggggattgaagcccggctgatggtaggcagaacttggagacaatgtgagaaggactcgctgagctcaagggaagggtggaggaacagcacaggccttagtgggatactcagaacgtcatggccaggtgggatgtgggatgacagacagagaggacaggaaccggatgtggggtgggcagagctcgagggccaggatgtggagagtgaaccgacatggccacactgactctcctctccctctctccctccctccagcaaaccctcaagctgaggggcagctccagtggctgaaccgccgggccaatgccctcctggccaatggcgtggagctgagagataaccagctggtggtgccatcagagggcctgtacctcatctactcccaggtcctcttcaagggccaaggctgcccctccacccatgtgctcctcacccacaccatcagccgcatcgccgtctcctaccagaccaaggtcaacctcctctctgccatcaagagcccctgccagagggagaccccagagggggctgaggccaagccctggtatgagcccatctatctgggaggggtcttccagctggagaagggtgaccgactcagcgctgagatcaatcggcccgactatctcgactttgccgagtctgggcaggtctactttgggatcattgccctgtgaggaggacgaacatccaaccttcccaaacgcctcccctgccccaatccctttattaccccctccttcagacaccctcaacctcttctggctcaaaaagagaattgggggcttagggtcggaacccaagcttagaactttaagcaacaagaccaccacttcgaaacctgggattcaggaatgtgtggcctgcacagtgaagtgctggcaaccactaagaattcaaactggggcctccagaactcactggggcctacagctttgatccctgacatctggaatctggagaccagggagcctttggttctggccagaatgctgcaggacttgagaagacctcacctagaaattgacacaagtggaccttaggccttcctctctccagatgtttccagacttccttgagacacggagcccagccctccccatggagccagctccctctatttatgtttgcacttgtgattatttattatttatttattatttatttatttacagatgaatgtatttatttgggagaccggggtatcctgggggacccaatgtaggagctgccttggctcagacatgttttccgtgaaaacggagctgaacaataggctgttcccatgtagccccctggcctctgtgccttcttttgattatgttttttaaaatatttatctgattaagttgtctaaacaatgctgatttggtgaccaactgtcactcattgctgagcctctgctccccaggggagttgtgtctgtaatcgccctactattcagtggcgagaaataaagtttgcttagaaaagaaacatggtctccttcttggaattaattctgcatctgcctcttcttgtgggtgggaagaagctccctaagtcctctctccacaggctttaagatccctcggacccagtcccatccttagactcctagggccctggagaccctacataaacaaagcccaacagaatattccccatcccccaggaaacaagagcctgaacctaattacctctccctcagggcatgggaatttccaactctgggaattccaatccttgctgggaaaatcctgcagctcaggtgagatttccggctgttgcagctggccagcagtccggagagagctggagaggagccgcattctcaggtacctgaatcacacagccaagggacttccagagattcgggtgtctaggcttcaaatcaccctgtcctaactctgcaacctgaaccagccacttaacctatctatccaatggggataggaatgtccaccacacatagggcatgtgagagaaggcctgacctccatcagaggacctcactcagcccttggcacagtgggcacttagtgaattctggcttccttcaaccagtttccagctgttctatccccttccattctctcagtgggtgaaatcgaagagactgaggacaataaagaacaaggaaccgaactgccggacgtggtggcatgcacctgtaatcctaccactttgcaaggccaaggtgagaggatcgcttgaacccaggagttccagagcaacctgggcaacatagtgagatcctgtctctattttttaaaaaagaatgaaacataggaataagatgtgggtgaaggactcacatgccggcttggtcccactggtctttgtggtgaaggaggggagaggtgagaggtgggtaatccggaaagagaaaagcaccccctccctggatgaaggctcttctggagagagtcaaagacaaataagggtggggcgcagtggctcatgcctgttatcccaacactttgggaggctgaggtgggaggaccacttgagcccactagttcaagaccagcctgtgcaacatagcaagaccttgtttctagaaaaaaaattaaagattagtcaggtgtagtggtgcatgcctgtaatcctagctcctcaggaggctgaggcaggaggatcactcaagcccaggagtttgaggttacagtaagctatgatcatgccactgtacccccgtctgggtgacagaacgagaccctgtctcaaaaaaataataattccaaaaacaaatatggagacggaaattgagcccccctagactgggagcccccactgagttcggaaattaggctttacctccagccctggggtgccaggcaggagaaaaccatgtggtaggctgagggggtagggtgacccattggggtgacctagatagggccttgggtcaccctctgcctcctccagcctgtggctgaaagtcagccatgaagtaatgggggacactgttactcatcccagaagcacccacacttactcacttttgggaagggggacctaaagtgtgaaaaaaaggtgaggattttccgtctcaccctaaatgggacaccctaagtggggcatcggtttttcctcctccccagaacttcctggtgttttcaggcaccacaggctccttcctgccatccccatctctctctaatattctccccttctttctccttcagcctcctcccttcagaccccatgagccttgaattaagctccttggaggagaagagttgactgtcgggtaggagacagagaggccttcaggcagctctagggggagaagtgcggggcccctccaggcttcattcctctgtcatgataggggcttactctgctgctgggcctttctgagtggtgcttgctgggctctgtaatgacccctctcactgttggggggtacccaagagaaaagagtatggtgcagagtctggttgggaccatgtggccctgaaaatcaggatgcctagagaagcttcggagtttgagaagtcccccttcctcccaccctccaactgggctaatggtggggcctggccattcagaggcagggagggggtgggacaggcagaccatcatccctaggagcaaaggccatacactgtgttgtgatgaattgtttcaagcaaccagaagagtactgagaatatttaacccgcacccgtgcacccaccctgaattaagacgtgtgtcgcaactcagcatctttatcggcagcactgaagctttccattctttattttcatcaggttcaaaatcaatttccaaacagtctcctacatttttcccactgccatggggtcctgggcgtccgggcccccaatattcacgcactcgcaccacgcactcatattccctcaccccaccatcacggccccaaagaaggtcttccctctcgcgaagtccaccatatcggggtgactgatgttgacgtacaccctctcgcccctccggagctgcaccaggccgccgaaccccacgctcgtgtaccagagaggcccgtacccttgtctcctggccgggtccagcactggagtcaccgtctcggcgccctcgagcagcagctcgggagtgcccggcccgtaggcgccccccgcccggtacagagagctgcgcagcgtgaccgagcggccctgggggtccccgccgccagggggcgcccggccccggtagccgacgagacagtagaggtaatagaggccgtcctgcgggagcgccagcccctcggcgtccgagaactgcgtcccgctcgtcagaaacgcctgttccttcgtcgtctcccagcctagcccctgccccttcagcggagcgcctgcggagacacgggccgacgcgctcttgggaatgcgatcctaaaggcttgggacttctggggaagtggcggcttttagcccctgcgggagccgagccgggccgggggaggagggatggtgctgtttctgggatgagtgcgagttgggggccgagggaacacggatgtggggtgcagaacgctgtagtggggacctccaggccggcttttgcttgcaccggagggaagaagaaactacactgcggggacgagcgtaagagtgggcacgagcgacaaaaggtcgtgaagcgggtgggaaaccgagcactggaatcatggagccgaaggactctgggcgagcagaactggaaccttcggattatttacactcttattcaggtcttggaggtccttacctatgaggtgggcagctgggagcccggggctgagatctgtttctggctcctcctctggcagcttctgaaaccctggaaggggcaaagagtccacgattgggggcagggcagccacccatgcaggctacccttgagagaacagggcgcagggatggggagcctggattcctagaggaagaggtatctggggacgcagcagggagctgggagcccctgagggtctgaagcggggaaggagagacagtctgctcttacccagtccttgctgggcctgtgccccggggtcggccgtctccgttacctggttgggtggggtcacagtgcccagagttcagattcagctcatgtcacccctacccctctgaaagtggacccaagctgcaggcctggggtttctcctaccagcaccatccccaacacacacctccttagaagggagaacaagcaaggcataggtacttgggcggagaaacagatgtacctcgggaagaggagaggagacacaaggggcttatgtcgggacacaagcacaacatcacaggaacatggaaagagagtcagcaaagagacaagacatccccaccagggacagccgagccagctgagccagagggggcaaaagaccacaggcacaaccagagggagccaagcatccgcaagatacaactctccaccagggcctgttgcagccactcaccagtcctccctgatcctggggcactaaggccagcacagccaggacagtgataggcaccgccagcaacaaggtcaccagagaagtggctcctgccacagctagcaggagggaacccctcccctggagcctcccacccctgccctccagccccagtgcccccattgagactgaaccagagccagagcagggggctttcatacctcagggacgggcccaccccctccctgtagacctgcacacctggctgggactttccgcacacccctgctcccctcacccagcttcctgtttacccagagctggggtggggcagctggatgcctgggttctctgaactggggaagaagttgaggttagggagacaggctctcagggtggaaccaaaggggtctttagacatcttctggctcagcagagagagaaactgaggcccagggagggaaggtagcttgcaggaagccagtcagcagagctgaaatgagaacacagatctccaggtttccaatgtggtttgcattcttctataccctcaaggtaggtgctggaggaagagctgatcccgtctctgaggtcaagggccggactaggacaaggactggaatcttgagggatggatgtctgggttccctgagaagaactgattcccatactgggctgacctcctcccgttcccttgctcatctccagccccctgtgctgagtgagaaagggagaggtaagccttagcctcaccactgactactgactcactaaggagggatggaaatggagctttacctcccttgctacaaaaagtaaagacagatggacgaggcatactcccaccctcagagagcttccaagtctacaatgagccctatccattagtaggtgcttactaaatgtttatacataaatgaataaaaggacaaataaatgcaggaataaccaaaacaaagcagcaaggaccacatgaatggtagatgtaggcagcatgagtggttaagagtcaagggagtagccggggtagtggcttacacctgtaatcccaacagtttgggaggctgaggcaggtggatcacttgaggtcaggagttcgagaccagcctggccaacatggtgaaaccctgtctctactaaagatacaaaaagttagccgggcgtggtggcacgcgcctgtaattccagctacacaggaggctgaggcaggagaatcacttaaacctgggaggcagaggttgcagtgagccaagattgcaccattgcactccagcctgggcaacaggctgagactctctctcaaaaaaaaaaaaaaaaaaaaaaaaaaagagtcaagggaagaaagaccaggtccaaggaagctggaagtggctccaatcatctccccttcttggtaacatctctatgtgtttccgtaatactaataataatatagctgacccacaaaatgcacttaacatgtttatgccactgatttacacactttaataatttttttttttgagacagggtctcgctatgtcacccagactggaatgcaatggcaggatcatggctcactgcagccttgacctcccaggatctatggattcacctacctcagcctcctgaatagctgggactataggcacatgccaccatgcccagctaatttttgcattttttgtagagatggatttttgccacattgcccaggctgggctcaaactcctggactcacgtgatctgcccgtgttggcctcctaaagtgctgggattacaagcatgagccatcatgcccagccaataattataatcctgacaaaaaccctaagaggaaactgaggtacagagaggttaagaaacttatggagctcacagagtcagtggcagaaccagaatttgaacccaggcatctggctccagagccttgataacaagacagtttaaaaactgaatactggggctgggcgcagtggctcttgcctataataccagcactttgggaggccaaggaaggtggatcatctgaggtaaggagctcgagagcagcctgatcaacatggtgaaaccccatctctactaaaaatataaaaattagcggggcgtggtggtaggcacctttaattccagctacttgggaggctgaggcaggagaatcacttgaacccaggaggcggaagttgcagtgagccgaaatcatgccattgcactccagcctgggtgacaagaacaagactctgtcttaaaaacaaaaacaaacaaacaaaacagtattaggccaggcgagatggctcacacctataatcccagcactttaggagaccaaggcaggtggatcacttgaggtcaagagtttgagaccagcctggccaacatggtgaaaccccttctccattaaaaatacaaaaattagctggatatggtggcacaaacctgtagtcccagctacttgggaggctgagacaggagaatcgcttgtacccagaaggcagaggttgcagtgagccaagatcacaccactggactccagcctgggcaacagagcaagactccgtctcaaaaaaaaaaaagagtactgacttgagatttgtatgtaaaatttgccttcctcaggccagaaaagaaatggggaaataaatactgaactccagtcaatgttaagcttctgaagggtttagatgtaaaatgtactgatatttgtaattttaaaagatatttaaaagtgagatggattgataaatatgtgataaagcaaataaaaaatgttaatagagccaggtgcagtggcccactcctgtaattccagcactttggaaggctaaggtggaaagattgcttgagaccaggagttcaaaatcagcctgggcaacatagtaagaccccatttctacaaagcctcatgtggtagctggtgtctgtagtcctagctactcagaaggctaaggtgggaggacctctgagcccaggaattcaaggctgcagtgagctatgatttcaccactgcacttcaggctgagtgacagagtgagaccccatctcaaaaacaaaacaaaacaaaaaatgttaatagtagcatctaggtggtaagaatatgttcactgtacaattattctcatttcaccctatgtttgcactttttaataataaaatgtaaaaaaaacaaaacaaacaaacaaaaaaccctgaatattattcagcatggggaacatggaggatggggagaagggtgggggaggaagtagaaggttcttgaatttggaaggggaaacgcaaattaatatggacccacccaggcaccacatctcctcctcaccccttgccttacaggcgctccccagtcttcaccctcctcaaggagtgggtgtgcaatcctccagcacccatctccttctccatcacagtgccactaagaagccttcacccaggtctctccagagagcctcaggccgctgcctttacttagttctgtgttcaatgccagaatgctgcctcctacaggaagtccacctgtattgcccacacctcctttcctgtcaccaacttgtcaccaactttctgtccttgatctatccacagggctcatgtagatctagtatggctgcctttaactctcatgtttgttaatcagacagccaagcagcctgctgcatagagctgcagaacaccaagtgggtcaccagaacaccaaatatgccagagctcccagtctgaactggagcagggtacatgtgtccacagacatatgccaagatcaagaggtctcaacagatgcagtgtaagaggtaatagagaagagttaatcaaggaagacacctgaaggtggtgggtgtttgctgactagtggcaggatcagtgaaatgactggagctgaggcagattatggccctagctacaggcccagaagtttgaaaagaaagatgttgtaaccctaaccctggagccgaacttcctctcctaacaatgctggggaggaacccaggctgggggagaagttaaagccagaggaggggcaggaatgtctgaggtggcaacacttctcttcagccagacagcactggccagtttggagtctgtccatcctgcaggccacaagctctgggtaagctgggaatgggcagggaccttggtggaaggatggtcacaccccagagtggggtgaagctaagatgaggggagggagagtatgggtttgagtttccctgggccgtcgaggaatcctctgagtctctgctccccaaagaaattaaagacaattcatttctgtgcccacggcccttatggcctccacctgcacttctgctccccaccccccagaattcctcttaaacccagaagggtcccagtttccagaccctagtcagtatatctggctctggggtgaagagaacggccccctcttcaccctcaaacaggaaccagtggttggaggggaggaagtgcctgaggggaagttatggggccccagatactcctccatgccccacttcagccctagcagcatctgcctgtgggaagcagctctccacaccagccaagggggcccccacactcccgcgctgctctgcggctcagggagcagcccacctgctgggtgtgctgatatcaccctcccttcttccccccagtgcccacacccacccaggcccaggctccttcccctccatcatccccttaccagcacctagaaccatccagggctgaaaagtcccctccaaaccacgtggtcagcccagggcagaggaaagggctgggctctggagttgggcagagctggccttaaaccccagctccacctttctgggatgggtgacctagtaaagtccaggcttgaatctcgggtctttacttgggcaacgggcaccatgataccctatgttctggggattagcagtgaggaatggaaagtgcccagctcagggttggcacataagggaggctccccagcctgggaacgattataacagagggcccctcacttcacagatgaggaacttgaggcaagtcaccagcccctgatcatttcgcctaaaagagcaaggactagagttcctgacctccaggccagtccctgatccctgacctaatgttatcgcggaatgatggtaagtaaagtgtctcttgcatctgcatagagagggtcctgggagcttaggaagtgatggggaacagtgatgtatgcagctcatgactaggtggacaggcctctggggacagctggtacaggagggaaagggacctcacgggaggcccagaaacctggtaagaggtgaggtattaaggtctgggatggagaagctctgagggtatatttttctgcctctaaaactgttggagagggaatctgagaaagctgcaaccaaccaggaggctggggtacgctggagaaggaatgggcttcataaccttgagccctcttccctgaagatatatgtatctacgggggcctggggctgggcgggctcctgcttctggcagtggtccttctgtccgcctgcctgtgttggctgcatcgaagaggtgagcgctgcactccctccctccccctgcagcagtgccccctgtgcccccacccccacacgctttcccactgctttcccagaacactgcctggccctggagccactgggaagccaacaggggagtccacgcctgctggtggggggagcccgggagggcccgggagaagcacaaagggtgggctgtgttgagcttcttcttttcttccagtaaagaggctggagaggagctgggtgagtctggggacagggaagggggagggcaagagagatcctgagtgggtgagtggggagaagcatggctgagcgctgagaggagggttggggacgggagacaaggagagagaaagtaggagcatgagagaggcagagaaaatcgaggcaaaagagaaagagaaaatgagacagaaaccaagagaaaaagtgagacagaggataggagagacagggagaaaatgagagtgagagagacacaaagagaagagcaatgaaagagagagagagagagaggctccagaaccaggcacagtggctcacgtctgtcattccagctatcgcaaggctgaggcaggaagatagcttgagctcaggggttgaagacaatcctggacaacatagtgggactctgtctccaaagaaaaaagagagagagagagagagagagagggagagagagagagagagagagagggagagaagtaagaaaggctggaggtgggagcagaactcacagggaaggatctgacggcatcgcctcccatcagcaccttctgtcctggtcccaggcccagggctcctcagagcaggaactccactatgcatctctgcagaggctgccagtgcccagcagtgagggacctgacctcaggggcagagacaagagaggcaccaaggaggatccaagagctgactatgcctgcattgctgagaacaaacccacctgagcaccccagacaccttcctcaacccaggcgggtggacagggtccccctgtggtccagccagtaaaaaccatggtccccccacttctgtgtctcagtcctctcagtccatctcgagcctccgttcaaattgatcatcatcaaaacttatgtggctttttgacctttgaatagggaattttttaaattttttaaaaattaaaataaaaaaaacacatggctcacccttccacccactctggggtcaaatagtaatttattgggtgaatgacagtgttcagggacccaagctcccctaacagccagaagagggtatgtgtgggcctggcaggaaagggcagttgccaaggaggagtcatatctgatccttcccatttctcaggacaatcaggctcagcctcctgggactgggggaagcagatgtgctgagctcccacatggtggtgggaggggcgctgggaccacagccggcagctgccttcttggacctttccaggtcagacctggtggaagggaaagttcagagttgggggaatccggagagagtagatttggcatctggagaatggagaagaaaacacttgagactcatgaggagttagtggtggggcagatttattggggtcttttgaagaggactagggacatctgggctctggaatcactcctcggggcccatctgaggagtggcagtgtgttcccatgtgacagtggcctggtcagagagaggacaggagctgctcagtgttgcagtcccgaggctctcctcttcctggtctctgtcctccctcctcccactctcttactgcccctcccatcccgtccactattgcccctggctccattactcacatttgccctggtaatagacggtgctgcccacggccacagagagaaagctgacagcatagaatccagcccgaaggaggaggactgtaccagcccctagctgaggatgttctgcatggggcaatggagacgggggttggggaagaagtgcacacaggctcagggagggaaggggcctcagaggagcatccctgcctcccaaggacattgcctcttggggcctccagccaggaggagacaccacctcccagcatctcacctttctccaccaccagccgagtcccattccctgtcccgacaccaaggcccagcacctccactctgcacacgtagatgctggcgtcatggcctcgcacgtcccggatgtgcagctcagcctggtggtcatggaggaaacgggaagaagcaagtggggccaggcggcccctgaactctggggttccattcctcacctccttccctggaaccacctcatctcggaaccacgtgacggagccaatggccagtctcccttggctggcattgaaggagcagggcaggaaggcagaggatccttccagggtacgaatctcagggggctgggacacccagagagcacaggatcctgggggcagaaggaagacccagagaaacacctccccagttattccaaagagaaaagacaacagagcttggagtagaacatcccagctttctccaggcatagggtgcatgggaatagatactttggggcctcattaaacccttccctcttaaccaatctgatttcttaacattgcttattaaatcatttttcggctgggtgcagtggctcacgcctgtaatcccagcactttgggaggccgaggtgggcggatcaccaggtcaggagatcgagaccatcctggccaacatggtgaaaccccgtctctactaaaaaaatacaaaaattagccgggcatggtggtgtgcacctgtaatcccagctactcgggaggctgaggcaggagaatcgcttgaacccgggaggcagaggttgcagtgagccaagattgcgccattgcactccagcctgggcgacaaagcaagactccatctcaaaaaataaaaaataaaaatcatttttcaaattcttcctataccaactctcactctcaccctctgccatcattctccagccagttcagtagtaacttgtctagctgaaatgtaaaccatcatggtgaaattaagctcattaatgaatgcagctgcctagttaactaatatcactcattatattatccaggtattattttagtacaaatggcattgtacagtaagccatccttcctctttttcttttttctttttttgagatggggtcttgctctgttgcccaggctggaatgcagtggtgcaatcttggctcactgcaaactccgtcccctgggttcaagcgatcctggtgcctcagcctcccaagtagctgggactacaggcacccaccaccacgactggctaatttttgtattttcagtcgagacagggtttcaccatctggtctcaaactcctgacctcaagtgatccacccacctcggaccaggctggtctcaaactcctgatctcaagtgatccacctgcctcggcctcccaaagtgcacccagccactcttggttttcgttaaagaaagtaactaattaaatctccaggtgaagacgtggccttaattggttgagattcctatttaacccgtccatgttgatgaattaaaccaaatattaaaatccctgattaaattatctacttagggaaatttacaagtcattctatttcagtggttctcaaacttgagtgtgtatggaaattacctggagcatctgctagaacagattcctgggctcagtaggtctggagtggggcctaagaatttgttctaggttcccagaaatccacattttgagaactcctgcatttagttaataatatgcctgatagttaaggtctctcagttcattaaaaacagtttcggccgggtgcagtggctcacgcctataatcccaacactttgggaggccaaggcgagtggatcacctgaggtcaggagtttgagaccagcctggccaacatggtgaaacctcgtctctactaaaaatacacaagttagccagcagtaatggcatgcacctgtaatcctagctacttgggaggctgagacaggagaatcatttttacccaggaggtggaggctgcagtgagctgagataccgccactgtactctagactggacaacagaatgaaactgtctcaaaaaaaaagtttcaccaccaggcgggcgcagtggctcatgcctataattccagtaatttgggagaccgaggcaggcagatcacttgagatcaggagtttgagaccaacctggccaacatagcaaaaccccatctctactaaaaatacaaaaatggctgggcgcagtggctcaggcctgtaatccccgcactttaggaggccgaggcaggcagatcacctgaggtcaggagttcaagaccagcccggccaacatggtaaaaccctgtctctactaaaaatacaaaaattagttgggtgtggtggtgcgcgcttgtaatcccagctacctaggaggctgaggcaggagaattgcttgaatctaggaggcagaggttgcagtgagccaagatcatgccactgcactccagcctaggtgacagagcaagactccgtctcaaaaaaaaaaaaaattagccaggtgtggtcgtgcgtgcgtgtagtcccagctactcaggaggctgaggcaggagaatcacctgaacatgggaggcagaggttgcagtgagccaaaatcgcaccacggcactccagccaggcgacagagcgagactcagtctcaaaaaaaaaaaaaaaaaagtttcaccaagaaatttatcatagatttacttggatctctcaaactaaaaagcctcacagtgggtgacacagagagactgtgaattgggggagtccactgagtgtcacctttggagcagtcccactcctccctcagagccgtgtgtttcagcccccaccaagcccgttccctatagcatctagtccagcctcctggatctccctcctcccacccacactccttggggtcctgagcgcacgccctgtcacctggatggaccatgatcaagatgagcaacagcatccaggccatgtcggaagatgtcccagttggcgaaggggatctgagcagtgaggtctgggtggaggaggaaggactcactacttgtagccaggcctttggtcaccagatggggatggggagcttcctatgacacacgggactcacacatcacttgccaaggaccacaactgccagggacctcgagcatcaaatgcttgcctccctgaggagagaggacagatgctgctggaggagatgtcagggtctctaggaggccaaggggccagcttgtggcaggctagctaagcgtgtgagggggagggtggggcttagatggctgctaacccaagggtgagtgggcggttgggcgggtgagaccaggatgtgggttcccccaccttccgaggttcaaggagaccagcttttacccagaacaagcctgcaggagccctccttggcccagaagctaacctacttaccctccctgctgctcaccagtacccagacccatcccacccattcccttcctggaatctggcctcactgcaccccagggctactccaagatttctatgagggattaggagaagcaagctgattggtgaagctatatttaatttgcatagcaatcaccttgtgtgtgtgtgtgtgtgtgtgtgtgtgtgtgtgtgtgtgtgtgtgtgtgtttggttgggtttttttgttttttgttttttttttgagctggagtctcactctgtcgcccaggctggaatgcagtggcacaatctcggctcactgcaacctctgcctcctgggttcaagcaattctcttgcctcagcctcccaagtagctgggattacaggcgcacatcaccaagcccagctaaattttgtattttttgtagagacagggttttaccatgttggccaggctggtctccaactcctgatctcaagtgatccaccagcctcgccctcccaaagtgctgggattcctgttttggttttttgagacagggtctggctctgtctcacccaggctggagttcagtggcgccatcacggctcactgcagcctcaacctccagggctcagttgatcctcccacttcagtctcctgagtagctgggactgcaggcgcacaccaccacaccaggctaatttttgtattttttgtagagatggggtctccctgtgttgcccaggccggtatccaactcctgggctcaaacaatccatccacttaggcctcccaaagtgcatgagtcaccatgcctggcgaaatgtatttcttaaataatgagacttgaaagtctaaattactccttaaaccatggactacaggatggatgttatgttagcaggcaggaaaacaacattcagctgggcgtggtggctcatgcctgtaatcccagcactttgggaggctgaggtgggaggatcacctgaggtcaggagtccgagaccagtctgatcaacatagagaaaccccgtctctactaaaaatacaaaattagccgggtgtggtggggcgcacctgtaatcccagctactcgggaggctgaggcaggagaatcacttgaacccaggaggcggaagttgcagtgagctgatatcgcaccattgcactccagcctgggcaacaagagcgaaactccgtctcaaaaaaaaaaaaaaaagaaaaagaaaacaacattcgtctctttggacatctccatcagagctcttggataactatgtacattgtcaatgagcagtaatcattttaaagaaatcttgtttttcggagcagtagacctcaacagtaggcttaaaatattcagtaaaccagcggggcatagtggcttacacttgtaatcccagcactttgggaggccaaggtgagaggacggcttgaggccaggggtttgagaccagcctgggcaacatggcaagaccctgtctctacaaaaaaatttaaacttagctggacatagtggcacacacctatagtaccagctactcaggaagttgaggaaggaggattccttgagcccaggagtttcaaggatgcagtgagctatgattttgccactgcatttcagcctgagcaatggagggagaccttgtctctaaataaaatacaatttaaattgggaatagtagtaaatggagtttaaaaaaaaataattttggctaggtatggtgggtcacacctgtaatcccagtactttgggaagcccaggagggcagatcacttgagttaaagagttggaggccaggccaggcatggtggctcatgcctgtaatcccagcactttgggaggctgaggtgggcggatcacgagttcaggagatcgagaccatcctggctaacacggtgaaaccccatctctactaaaaatacaaaaaattagctgggtgtggtggcatctgcctgtagtcccagctactcaggaggctgaggcaggagaatcacttgaaccttggaggcagaggttgcagttagccgagattgcgccactgcactccagcctgggtgacagagcaagactttgtctcaaaaaaaaaaaaaaaaaaaaaagagttggagatcagcctggacaacctgacgaaaccctatctctacaaaaaatacaaaaattagctgagcatagtggctcatgtctgtggtcccaactactcaggaggctgaggtaggaggatcatttgactctggaaggcagaggtttcaatgagttgagatcatgctgctgtactacagcctgggcaacatattgagaccgtgtctcaaaaacaaacaaacaaacaaaaaaaagaaaaattttaaaatcagtaaaccacgttgtaaacagatgtactatcatctaggcttttatttatttatttatttatttatatatttttttgagatggagtcttgctctgtcacccaggctggagtgcagtggtgcaattttagctcactgcaacctccgccctctgggttcaagtgattctcctgcctcagcctccctagtatctgggattacaggtgactgccaccacacccggctaatttttgtatttttagtagagacagggtttgaccatcttggccaggctggtcttgaactcctgacctcaggtgatccgcccacctcagcttcccaaagtgctgggattataggcatgagccaccacatccagccatctaggctttattgttccatttacacagcgtggcagagtaaatttagctaattcttgccaagtgcagtggtatgtgcctatgtctctgctactcagaaggctgaggtggaaggatcacttgaggacagaagttcaagactgcagtatgctacgattttgcttgtgaaagccatggctccatggcactccagcctgggcaacagagcaagaccttctctctctctctctctttttgagacaaggtctcactctgttgcctaggctagagtgcagtggcacaatcacggctcactgcagcttcaacctcatgggctcacaccatcttcccacctcagcctcctgagtagctgccacacaccaccatgcctagataatttttgtattttttgtagagacagggtcttaccatgttgtccaggctggtctcaaactcctgggctcaagtgatttgcccactcgacctctcaaagtactgggattacaagcatgagccactgcgcttggccaacctcagctctacaaaaaagaaaaaaaaagtccaggcacagtggctgactcctgtcatcccagcactttgggaggccaaggagggcagatcacttgaggtcgttagttcaagaccaacctgaccaacatggagaaaccccgtctctactaaaaatacaaaattagtcgggcgtggtggcgcatgccggtaatcccagctactcgggaggcggaggcaggagaatcactgggagacggaggtagtggtgaactgggatcgtgccattgtactccagcttgggcaacaagaacaaaactctgcctaaataaataaatagataaaattagccaggtgtgctggtgtgttccagtagtcttagctacttgggaggctgaagcaggagaatcacttgagcccaggatttcgaggctgcagtgagctatgatcttgccactgcactccagcctgaatgacagggtgagaccctgtctcaaaaaaaaaaaatcactactgacagatcataacagataaaataatcaagaaaaagtttgaaatattgcaagaattaccaaaatgtgccactgagacacaaagtgagcacaggctattggaaaagtggcacctacagacttgctcaacacagggttgccacaaacttcaatatataaaaaaatgcacatctgtggaacacaataaaacaaggtaatacctctacagggattggtacaagagtatgccagacactcttgtatgtgtatcacacagctacaggagataatacagcacatagaagtgaaggatgacatgtaatatgccatgtgtccaccccttaccgcatgcccccttctggctccttttactattacattttttagagacaagggtctcactctatcactcaagcaggaatacagtggtgtgatcattgctcactgcagcctcgatctcctggactcaagcaatcctcctgcctcagcctcccaagtagcttggaatactggtatgtgccatcacacctgactttttacttttatttatttttgaaagacagcatcttgctatgttgtccaggtctcaaactcctggtctggctccttttatttattttatttatttatttattttgagatggagtcttgttcttgttgcccaggctggagtgcaatggctcaatctcagctcactgcaacctctgcctcccgggttcaagcgattctcctgcctccgcctcccgagtagctgggagtacagacgtgcgccaccacacccagctaatttttgtatttttagtagagactgagtttcaccatgttggccaggctggtctcaaactcctgaccttgtgatccgcccgccttggcctcccaaagtgctgggattacaggcgtgagccaccgcgcccagcctggctcattttatatgaatacatgttgttgttgttgctgttgttgttgtgagacagtctcgttcagtcgcccaggctggagtgcagtggcacaatcttggctcattgcaacctctgcttcccaggctcaagcgattcacgtgcctcagcctcccgagtatctgggttcacaggcgtgtgccaccacactcggctaatttttgtgtttttagtactgacggagttttgccatgttggccaggctggtcttaaacacctggccttaagtgatccacccgccttggcctcccaaagtgctgggattacaggtgtgagccaccacacctgacctaatatatgttttttcctttgtatctgtgtttctagctctgtgtcacagtacttttgtagactgtccagttcccacccatcactgaagtaattcagagctttcttttggagaagcagtcatctcatggttaagaatgctggtttggaatgagtctaggttcaaatgtcagctcccccgcaatccccacaattatgttatacaacctttttttttttttgagacagggtctcactctgtcaaccattctggagtgcagcggtgtgatcatatgatcatagctccccgtggccttgaactttgaactcctgagctcaagtgaccctcccacgtcagcctccagagtatttgggactacagacacacatcatcacgtttggctcacttatttttattttttgtacagacagagtctcaccgtgttgcccaggctgatctaaaactcctggcctaaagcaatcctcccacttcggcctcccaaagtgctgggattacaggtgtgagccactgtgcccagtctaatcttgaacaaattattttacctccctaagctaccggaacaaccacacatgccacacaacctgggaaggaccaactcagccattctccagcagcgaagtggctgccaccccagggatatctaactagaggatgtgggatggaggcgtcatggcaaggcaaggcctgccccctggtggtcagagagcatgggaggcccgagctaccaatggtggcttttctcaactgggccttgattccagcttctgcccgatcccctaccttgcttgcctccttctatcaacaccccattcacaccccaaaggatcaatataggaaaaattgtctctactatctcagctgtaagaagcccacggtttggggagggagaagaggtcaccaccagtggggacgtggaataagtaactggctggggataaaactccactcttccggccgggagcagtggcccacgcctgtaatcccagcactttgggtggccgaggtgggcagatcacctgaggtcgggagttcgagaccagtctggccaacatggtgaatccccatctctactaaaaatacaaaacttagccagacgtggtggtgcgtgcctgtaatcccagctacttgggtggctgaggcacgagaatcacttgaatccaggaggcggaggttgcagtgagccaacattgtgccactgcactccagcctgggcaacgagcaaaactccgtctcaaaaaaaaaaaaaaacaaactccactcttccacagtgtacactcaatcacatggttctactccacgtcccaaggcaatgtggcttagaagacaaatcagcctaggttggagtcctggtgccactactgtaaactgggggtaccacctgtaaacttccagaccccattgccctaggtgttcaatgtgtggttcttctccagtgcttcccccgtcctgtgcaagggtggcagtgccattgctacacctggactcaagggcatcctgctctcccagctcttttctatatctaagacttctaaacatttgtcatagctaaaaatgttccagattccaaagacagtatgtgggttttttttttcagtccatctagaataaatcctgatatgtgtgtacattcaagggaccccttttaataactctgagaacctctagggaaggctaacctgcaagacaggaactgctgcgctaatcagcacagtgggcacaagaatggaactttttttttcttttttttttcttgagacagagtcttgttctgttacccaggctagagtgcagtggtgcgatctcggctcactgcaacctccgcctcccgggttcaagagattctcctgcctcagcctcctgagtagccaggattacaggcacccactaccatgcccagctaattttcatatttttagtagagacggggtttcactatcttggccaggctggtcttgaactcctgacctcgtgatccacccacgtcggcctcccaaagtgctgggattacaggcgtgagccactgcatccatcctggccaaggatggaacttttctaaagaaattattcccaggcactcaagaggaaaggcaacaaataaaacagtgttgaagtggatgtgcactggtctctgtttttgtgtgtgttttttttgtttttttttttttgagagggagtctcgctctgtcgcccaggctggagtgcagtggtgtgatttccgctcactgcaacctctgcctcccgggttcaagcgattctcctgcctcagcctcccaagtagctgggactacagcgcctgtcaccatgcctggctaacttttttgtatttttactagagacagggtttcaccatgttggccaggctggttttgaactcctgacctcaagtgatccacctgcttcagcctcccaaagtgctaggattacaggcgtgagccgccgcacccagtctctggtctgacttctttaacaacaagctgtgggctggctggatgtagttgaggccaataaactcccaactcagaccatgaaaacaggtgaaaacacaaaagtccacaatccagcacaggtgatctcatctttcccccacccccaccagggttcctctacgtgctggcaggggtgagattgagtgacttctctggccaagtcttatcaatatttttcaactaatgaatggctcccaggtgatgatactttcagcttctgagaacagcttctcctctgaggctcatagcatctgacctcacgaccttcaatctctccttggtgtcgtccactcgccctcacattcatcaagagcccatccctgactctgcagcctcttctctatttattttttctttcttttttcttttttcttttttttttttttgagacagagttttgctgttgttgctggagtgcaatggcgtgatcttggttcaccgcaacctctgcctcccaggttcaagcgattctcctgccccagcctccagagtagctgggattacaggcacctgccaccatgccaggctaatttttgtatttttagtagagaaaaggtttcaccatgttagccaggctggtctcgaactccagaccttgtgatccgcccacctcggcctcccaaagtgctgggattataggcgtgagccaccatgcccagcccacttcctctctatttcaacctctgccaactccttaatggacttaatgtccatatgaatgactttttttttttttttttttgagagagagtcttgctctgtcacccaggctggagtgcagtggcgtgatctcggctccctgcaagctccacctcctgggttcacgccattctcctgcctcagcctccctagtagctgggactacaggcaccagccaccatacctggctaatttttttgtattttttagtagagacagggtttcaccatgttagccaggatggtctcaatctcctgacctcgtgatccacctgcctcggcctcccaaagtgctgggattacaggcgtgagccaccgtgcccagccataaatgacatttttaaacattgatatataatttcatacagtaaaatgcacagatcttaatgtacagtttgatgacctttggccaatatgtacacccatgcaaccacactgtaatagagatatagataattctcattatcctggaaaattcctccatgcccctttttggtaaatccctttcccctcctagatgcaaccattttaccatttttaacctctgtagacttttttcttgggacagagtcttgctctgttacccaggttggaatgcagtagtgcaattatagttcactgctgccttgacctcctgggctcaagccatcctcccacctcagtctcctgagtagctacgactacaggcatatgccaccgcacccagctaattttttaacagtttttttgtaggctgggtgcagtggtttaggcctataatcctagcactttgggaggccgaggcagggggatcacaaggtcaggagctcaagaccatgctggctaacacagtgaaaccccatctctactaaaaatacaaaaaaaaaaaaaaaaaatcagccgggcgtggtggcacatgcctatagtcccagctactcgggaggctgaggcaggagaattgcttgaacctgggaggcagaggttgcagtgagccgagatcgcgtcattgcactccagcccgggtgacagagcaagactctgtctcaaaaaaaaaaaaaaaatttttttttgtagagacgaggtccttctatgttgcccagactggattctaactcctgggctcaagtgatcctcctgccttgacctctctaagtgttgggattacaggcctgagccactgcgctcggcctctatagattagtctgttcttgaacatcatattaatggagtcatatagtacatactcttgtatctggctcctttcattctgcttaatgtctgtgagattcgcccacgctgttgtatgtatcagtgtttcattccttttttttgctgagtggtaatcctttatatgatgtagcacagcttgttgatctattcacctgatgaagtacaattgggttgtttctattttttgtttttcttattatggctcaatctgctatgaaacttcttgtacccatctcgcaaatgccttttcaataccctaagtgtgcaacttcacagttatttcaccttgtccactccaatcatcaccttgactctccatgacctacatctcagatcctgtcaccatggaagctgtttcactttgaaatctcacctcctctttcccaaggacataaaagccatccaacctgagtcccccagactcctgtaccctaaacgtgtgcttttataccactgtcctgttggaaaatttttgggttgtttctcccacttttttttttttttttttttgagacagaattttgctcttgttgcccaggctggagtgcaatggtgcgatctcggctcactgcaacctccgcctcctgcgttcaagtgattcttctgccttagcctcccaagtagctgggattacaggcatgtgccaccacacccagctaattttgtatttttggtagagatggggtttcaccatgtcggtcaggctggtctcgaactcctgacctcaagtgatccgcctgcctcggcctcccaaagtgctgggattataggcatgagctagcacccctggccccactttctttttaaaaagtgttattatatattttttattatatatatttttgagatgagatctcactatgttgcccaggctagtctcaaagtcctgactccgggctttaggtgttcctccgacctcagcctttcacgtagctgggattataggcatgcacctggcttcccactttcattcaataaattttgcgcatctaccatggctttcctaggcaatcctgtcatagccacagttgtcactactgcttattctctgtcaagtccccaatctacatctccccctcaggcctctttcttgagacctaagtccacactatctaactgctctctaggcggcttaccctgaatactccacaggcatttcaaagtcatcagtgtccactcagaccaggtcagcctcctgtcatccctgtcccagtgaatggaaacacaaagccccagtcacttaaggcaaacacctgggattcatcctactctgccttctccctcagttcccccatccaaaagatctccaggccctgtccattttgcttctgaaagatcgcaggtgtctttcccttgctcttcattccactggttgctaaatccctcatcaactcaaggggaaacgagcagagttgcttctctgatgggtagtgtggtttctgcacagcatccccttcatcccaccactgctgggcattgaggttcattcatctattcagcattgctcttcacgagggccttccatgggccagacaccctatcttcatctctcttaatcgctcttttcagtatctctctccttatctctcatatttcccacagctctgtccacaactctttctgtctcaccatgttattcatattacttgtttcttcccccgtgtccactcaaacgccacatctctacacacccctacccctctgcctctctgtcacatgcatacacacttctgcttattcactcattcaacaaatattcagcgagcaccttccacgtgagacattctattttttttctttttttttttttgcgctctcagctcactgtaacctccacctcccaggttcaaatgattctcctgccccagcctccagagtagctgggattacaggcacatgccaccacccctggctaatttttgtatttttagtagagatggggttttgccatgttggccaggctggtcttgaactcctggcctcaagtgatccacctgcctcagcctcccaaagtgctgggattacaggtgtgagctgccgtgtctggtctgcctctccgtctttctctctctctgtcttcctccatctctcttcgcatcactttctgcctccccatcattctccatgttttcccttcccatctctccccatctacataccttattcttttactccatttctcttccttccccatttctctctgggtgagagaatgaaggaaggctagtgactagtcacctcttccctctaggggccagagttcaggcctgcctcagctctgccaggctggttggcactactcttgtttgcccttggagtctctgcacaaggatgcttaaaaaaaaaagtttaggccaggcacagtggctaccgcttgtaatcccaacactttgggaggccgaggagggtggatcacgaggtcaggagttcgagaccagcctgaccaatatggtgaaactccgtctctactaaaaatacaaaaagtagccaggcgtggtagcatgcacctgtaatcccagctactcaagagaagaatcgcttgaacccaggaggcagaggttgcagtgggccaaaatcacgccactgcactccagtctgggcgacagagtgagactccatctcaaaaaaaaaaaaaaatttgtgcagcagcgacagaaaagtaacctacaatattagaggaagactcacatctctcagaaactatatattaagcaggcaaaaacattattaaagacaacgggtgcggtggctcatgcctgtaatcgcagcactttgggaggctgaggagggtggatcacgaggtcaggaggtcaaggctatcctggctaacacggtgaagccccatctctactgaaaatacaaaaaattagccaggcgtggtggcatgcatctgtagtcccagctactagggaggctgaggcaggagaatcgcttgaacctgggaggtggaggttgcactgagctgacatcacttcactgcactccagcctgggtgacagagcgagactccatcccaaaaacaaaacaaaacaaacaaaacacacgcacacacaaaggtgggagtgttatgtaagagaactgcaggggatatttccactcccaggctcaaaggggtgaggggagagagaggttacagcagtggttcttagttattttgtgccacagatccctttggcattctagtaaagcataaaatttaaaaaatatacatacaaaaacaaatcggccaggcgcagtggctcacgcctgtaatcccaacactttgggaggccgaggcaggtggatcacccaaggtcaggagttcgagagcagcctggccaacatgacaaaaccctgtctctactaaaaacaaaaaattagctaggcatggtggtcggcgcctgtaatcttaactacctgggaggctgaggcaggagaattgctggaaccgggaggcggaggttgcagtgagccgagatcacgccattgcactccagtctgggtgacagagcaagactccgtctcaaaaaaaaaaaattgcatcgaaatcaaattccagttatcaaaatattaataaaaactttcaatagagtaaattgaaactgtcccaagattgacaagaattgcatgctgggatctgggcagaaatatagttataattaagcataaaccaggctgcactttggctcactgctctattcctgcaagtctccagatcctgaccatctgcatccccgttgtgctaacattaggatgagaatgtctctatattatgatccattgtctctatatttaaaaaaaaaaaaaaaaagaagccaggcacggtgacttacgcctgtaatcctgacactttgggaggctgaggagggcggatcacgaggtcaagaaatccagaccatcctggccaacatggcaaaaccctgtctctactaaacatacaaaaaaattagctgggcttggtggcgcgcatctgtagtcccagctactcaggaggctgaggcgggagaatctcttgaacccatgaggcagaggttgcagtgagccaagatcatgccactgcactccagcctgggtgacaaagcaagactctatctaaaaaaaaaaaaaaaaaagaccagcactgtggctcacgcctgtaatcccagcactttgggaggccaaggtgggcagatcacgaggtcaagagtttgagaccagcctgggcaacatagtgaaaccccatctctactaaaaatacaaaaaaataatggcatgaacccaggaagtggagcttgcagtaagctgagatcctgtcactgcacaccagcctgggcgacagagcgagactccgtctcaaaaaaaaaaaaaaattgctggacgtggtggcgggtgcctgcaatcctagctacttgggaggctgaggcaggggtatcacttgaatccggaaggtggaggttgcagtgagccgagatcgcgctactgcacaccagcccgggcgacagtgtgagactctgtctcaaaaaaaaaaaaaaaaagataattagtcaccatggctgggtgcagtggctcatgtctgtaatcccagcactttaggagggcaaggcaggtggatcacctgaggtcaggagttcgagatcagccagagccaacatgatgaaactccttctctcctaaaaaatacaaaacttagctgggcgtggtggcgggcgcctgtaaccccagctactccggaggctgaggcaggagaattgcttgaacccaggaggaggaggttgcagtgagctgagatcatgtcactgcactccagcctgggtgacagagagagactccatctcaaaaaaaaaaaaaaaaaaaacctaaggcgtggtggcacatgcctgtcgtcccagctactcaggaggctagggtgggaggatcacttgagcctggaggttgaggctgcagtgagccatgaccatgccactgcactccaggctgggcaacagaacaagacgctgactcaaaaggaagaaaagaaagagaagaaaagtctatctgggtatgatgatgactcctaatatcttctctctggtggttgatctggtcatttgataagatctctaggcaggaggtcttaagacaattgcacttcttttgcaaagaagttttttcagtcagataaggaaattccagaaagtgtggtaggacaattctaaggcagcttctaaggcctctcagcatttcaaagcaccagtctttggggtatcactttctgagccccagcatcttcttgcatgtctattcttttcccctcatctctgtttccttctcagaaggccctgagtttccttctccacccgcttgtcttcctatatacccttcagtattcactttttttggtgggggggatggagtttcgcttattgcccaggctggagtgcaatggcgtgatctcggctcactgcaatctccacctcccaggttcaagcgattctcctgcctcagccacccaagtagctgggattacaggcatgcgccaccatgcctggctaattttgtacatttagtagaaacggggtttctccatgtttgtcgggctgatctcaaactcctgacctcaggtgatctgcctgcctcggcctcccaaagtgctgggattacaggagtgagccaccgcgccaggcctagtcttcatttttgtcccacagtcagagcagctgtcattctctctatcccaggcagtttttctgagcatctaagcactgtctcaccccagtagtctgtcaagccattctcaatggaaagaccagtctgggaggcagtctcactcagaataaaagccagagtctttacaaggccctacccaagctgacctcctcctcacctggcttcagcagcacaggcctccctgctactccatgaacactccagatatccacactgctctcacatcagggcctttgaacttgctgttccctccacctgaaatgttcttctcccattgtgatattgttataataaaaatatatatttttgggcccgggtgtggtggctcacacctgtaatcccagcactttgggaggccgaggggggcagatcacgaggtcaggagatcaagaccatcctggctaacatggtgaaacctcgtctctactaaaaatacaaaaaaaaattagccgggtgtgggggcaggcacctgtagtcccagctactcgggaggctgaggcaggagaatggcgtgaaaccaggaggcggagcttgcagtgagccgagatcgccactgcactccagcctgggcgacagagcgagactccatccccccacaaaaaaaaaggccaggcgcggtggctcatacctgtaatcccaacactttgggaggccaaggcggtcagatcacaaggtcaggagatcgagaccatcctggctaacatggtgaaaccccgtctctactaaaaacacaaaaaattagccgggcgtggtggcaggcgcctgtagtcccagctactcaggaggctgaggcaggagaatggcgtgaacctgggaggtggagcttgcagtgagcggagatcgcgccactgcactctaacctgggcaacagagcaagactccatctcggggaaaaaataaataaatatgtatatatatgggttgggtgtggtggttaacacatgtaatcccagcactctagaaggctgagaccagaggatcacttgagcccaggagttcaagaccagcctgggcaacctggcgagacttcatctctacaaaaaattttaaaatgagccaggcatggtggtgcgggtcccagctgcttgggaggctgagatggaaggattgcttgagcccaagaagttgaggctgcagtgagctatgatggtgccactgcactccaacctggatgacagaacaagaaactgtctcaaaaaataaaaaataaaaaaaaaaaaaaggtcaggcacggtggctcaggcctgtaatcccagcactttgggaggccaaggtgggaggattacttgagcccaggcagtcaagaccagcctgggcaacacaaggagaccctgtctctaaaaaaaattttaaaaattagccaggtgtggtggcacatgcctgtagtcccagttactcaggaggctgacaagggaggatcgcttgagcctgggaggtcaaagctgcagtagccatgtttgtgccactgcactccagcctggataacagaacgagaccctgtctccctgtctcaaaatattaatgtgtgtgtgcgtgcgtgtgtgtgtgtgtgtgtgtgtgtgtgttttggtctccatcctggctcctggccagacctcctaaagcccttgtaatttcctaaatgataaagtgaagggagcttttgttattcataacaagctcttttcaaccacaactgagtttatgttagtaagttgacttttagaaagcccctaaggttggggtttgttgccaaggtaggcaactgtgtgattagagagttagaacttttagctccaaccctctgacctccaactaatggctattgaatcaagtatgcctgcataatgaagcctccataaaaaaaaacaaaaaagatgagggttggagagctgccaggttgatgaacacatggaggtgcagggaggtgcccagagaggacaagaaagctccaaatcccccttccccgatactttgtccggagcaactcttccatctgactgttcctaagttttatccttcataataaactagctaacataagtaaagtgtttacctgagttctgcgtgctattccagcgaattactgagccagaagagggagtcataaaaacagttaggaggcctggacttgtttgtgattggtatctggagtgggggcagccttgtagaactgagcccttcaacttggggattagataactggtaattatgggtagagtgtcagaactgaattaaactgcaggactcccagttaatatctaccaagaactgaagaattgattggtgtgggagaagtctccacatgattggtgtaagaagtggtgttcttggccaggcgcagtggctcacgcctgtaatcccagcactttgggaggccgaggcgggccgatcatgaggtcaggagattgagaccatcctggctaacatggtgaaaccctgtctctactaaaaatacaaaaaattagccaggcatggtggcgggtgcctgtagtcccagctactcgggaggctgaggcaggagaatcacttgaacctgggaggtggaggttgcagtgagcagagactgcaccactgcactccagcctggccaacagagcaagactccatctcaaaacaaaataaaacaaacaaacaaaaaaaactgagattctttgcaaagagcctggaataacttccttttagtcctggactataatgatgatgataaatatacctcgatgtaaccctgagatcccaagattcactagcccttgaataaaaaaaaggaaaaagaaaaaaacagtatattttttcgttttgcaaatcacagttcccttattaagatggaattgctgccaattacagagaagctatttgcctaagccaaaaatccatgaggttcacatggacttatagttacacaaattagaaacaaatgttatatttaaaaccatagagaaatgcccaggtgatgaaagctggggtgaaggagtctgcacattcatttcaaactgttaaaggatttgtgggccatgcaatggtcccttgcattagagaagtcaaagagctttgtgcaatcctctcctgtctgtgatctggaagacacgtgctcatcacagagctccagctgctccgagactttactcctttcttcagctgcacgcactgctctctcgcttttgttaggaattgactaattcctcctcttcctcttcctcctcctccttgccatctctaggcccagtcagcatctcttgttcatcctctgatcccatgtccagctatggttctggattcaacactagcagcaacagtggcgctgactccactttaggatcaataaatatttttctggctaggcgcagtggctcacatctataatctcagtactttgggaggccaaggtgggtggatcacaaggtcaagagatcgagaccatcttggccaacatggtgaaacctcgtctccactaaaattacaaaaattagttgaacatggtggtgcgcacctgtagtcccagctacttgggaggctgaggcaggagagtcgcttgaacccaggatgtggaggttgaagtgagccaagatcgcgccactgcactccagtctagcgacagatggagactctgtctcaaaaaaaaaaaaataagtatttttctttctagccgtatatccaccttacatggtccctcaactccccaagcccactctgcctgccccatctcctccttccacatcctctcctcaacctagcacttggttggcaatgccttcctcgatcctctgccaaagaccctctagccagtgcttaccctgtctgttctctctctttacccaaagaaatacataaagtttgaccagaatggaaacagagatatcagtgaaaaaaggtgatttggggaagtgtgcaggcctaggaagacagaggcttgttcctttgcttgcttaaaatctttgatcaaacggccaggcgtggtggctcacacctgtaatcccagcactttgggagggcgaggtgggcgaatcatgagatcaggagttcaagaccagcctggccaacatagtaaaaccccgtctcactaaaaatacaaaaaattagccagctgggcgtggtggcaggtgcctgtaatcccagctactctggaggctgaggcaggagaatcacttgaacccgggaggtggaggttgcagtgagtggagattgcaccactgcactctagcctgagtgacagagtgagactccatctcaaaaaaaagaaaagaaatctttgctcaaatatcactttttcagagaacgcttctctaaccactctatttattttattattttattgtattttttgagacagggtctcactctgttgcccagactggagtgtaatggcacggtcatggctcactgcagccttgatctcctgggctcaagcgatcctctcacttcagcctcccaagtggctaggaccacaggcgtaagccaccgtgtctggccagaccaccatatttaaaactggggacaagtcaggctcacacctgtaatcccagcactttgggaggccaaggtgggaggatcacaaggttaggagttcaagaccagcctggccaacttggtgaaaccccatctctactaaaaatacaaaaattagccgggtatagtggtgatcgcctgtaatcccagctattcattaggctgaggcaggagaatcgcttgaacccgggaggcagaggttgcagtgagctgagattgtgccactgcactccagcctgggcaacagagcgagattctgtctcaacaaaaaaagctgggtgcagtggctcacgcctgtaatcctagcactttgggagtccgaggtgggtagatcacctaaggtcaggagttcaagaccagcctggtcaacatggtgaaaccccgcctctacaaaaatacaaaaattagctaggtatgatggcaggtggctgtaatcccagctactcggaaggctgaggcaggagaatcgcttgaacccaggaggcggaggttacagtgagctgagatcaagccattgcactctagcctgggcgacagagtgagactccgtttaaaaaaaaaacaaaaaacaaaaaacaaaaaactggggaccattggcaataatactcctatgtcccctcttccctactttgttttcctccataggcacctggcgccttttttttttttttttttttttttttgagacggagtctcactctgttgcccaggctggagtgcaatggcgcgatctcagctcactgcaacctctgcctcccgggtttaagcgattcgcctgcgtcagcctcctgagcagctgggattacaggcacgcaccaccaggccctgctaatttttgtatttttagtagagatggggtttcaccatgttggtcaggctggtctccaactcctgaccttgtgatccgcctgccccagcctcccaaagtgctgtgattacaggcgtgagccactgcgcctggccacctagcacctttaatatacttatttatttgtattgtctgccttccccaattagatcaaccatgaagacaagagttttcatttgttgggttctctgggcctagaggcatgtctggcatatagtaagcattcagtaaatatctgttgagtgaacgtatgaataaagaagtgagttcctcccagcaggcactgagaacattgggagtacagggttgcagctctctctgcagcaggagaatgtagctgcaataaagggaagtcaagaagccagagtccagccaggtgcagtggctcatgcctgtaatcccagcactttgggaggctgaggtgggtggatcacaaggtcaagagatagagaccatcctggccaacatggcgaaaccccatctgtactaaaaatacaaaaattagctgggcgtggtggtgggcgcctgtagtcccagctactcaggaggctgaggtaggagaattgcttgaacccaggaggcagtggttgcagtgagccgagattgcaccattgcactcccgcctgggcgacagagcaagactccgactcaaaaaaaaaaaaaaaagcagcagcagcagccagaggccactccagcatctcccctacctggcttgggtcagggagagggcagtgagaagtgaaaactcccagctacagaaaaggaaatatgttggggggaagggagaaggaaaggtgtcttcatcaatgccggggcagggtagatggagccctgggcagggagtttggaccaggaaatctcaatgagggaaatgtgctgtcctcacctctccaagaagcgactggccaaacagagtgacagaggggataaaggttatgcctagggaggcatgtgtcagaggctatcatccactctgttgaacccacagtgaccagcaccaccatcacacaaacatgcctgcatgtgtgcacgcacgcgcagtgtgcaaacctgatgtcagcctcactccctggctcttctgtccacaaacgctgtttctttaagtaccactttcagttcctccaaagaatctacttaaactcttaaattcctgatctctatagattttactaaagatttcaaaggagataagatgagagggttacgttgcacattctaaagcaaacaaattaaaatgttttgttagacatttccatatttttaagggcctccttggagctgccaggctgggagtgaggtttctctccctttctaaaccctgtgcccatcttgtcaccctcctggagctgccagcagacttcagattcttctccgatctacagagcagaaaaattcagccagcccttccttgtcttcctatccacagctgcctgcccagactcatgaaacctgacaaaatgcaaggtcttatcattacctgaaccttggacctgttcaaaaatactagttcctgagaataaatatccctggtgtcttcctgcccttcctgcacacctccagtggcttatcaaaatatttgtttcatgcgcacactgggctctcatttaagaggaatttgggagaatgttattttctaatctgcatttcacaccaggctccccctccttcctggggtgctagtgtcagcagaacctgatggggaagtgaggtctgggaggcagaggaggaaggaatgaggggaaaggggaagtttgggaggaaggcttctgagaagactggtgggagagaaggagagcctgcagacagaggcctccagcttggtctgtctccccacctctaccagcatctgctgagctatgagccaaaccagggatttacagggtagggagggtgggataggcagcggcattagatcggaggaatgagatggacagacctgggctgtgggctaggagggcagtcagctggcctagggtagcccgggctggtgtcagggtaaggagaggaagggagggatgagggctgattaatttttttcaccccacaggaggaaaagctttcagactgctgaaggcccagcaggaagagaggctggatgagatcaacaaggtagaaggaagaactaagggggcagagccagggggatggggcgtggatggggagggcctaccctggctcttattttcccctccatagcaattcctagacgatcccaaatatagcagtgatgaggatctgccctccaaactggaaggcttcaaaggtgagggggaaactgtaggcggtggagacagggctgggggtaggagggttaggatttccacaagaacaaggcaggaacagcagagataaaaagtttacttttgtggtagcaaaaggggaacctgcctttattgccctcctgccacactgcggtccctttcccgggcctgcctctctcagcatcccctctagctccttacaccctagcggggcccctcaactccccaaccccacttcctctgcctgcccctcctcctccttccacgttgtctcctccacctagcagttggttggcaaccccttcctcagtcccctgctgaaaaccctccagtcagcgcttatcccttctgctctctcccctcacccagagaaatacatggagtttgaccttaatggaaatggcgatattggtgagaaacgggtgatttgcgggggcagggtggtgtgcaggcctaagaagacagaggtctctcctacatgctccattcctcatgatttgggagggggcccacctaccacagtgggaggaaggagaatggggatgcggaagtgggagaggagagagagggtctccccaccttctccccatccccatcctctgcccccagatatcatgtccctgaaacgaatgctggagaaacttggagtccccaagactcacctagagctaaagaaattaattggagaggtgtccagtggctccggggagacgttcagctaccctgactttctcaggatgatgctgggcaagagatctgccatcctaaaaatgtgagtgtcaatttccaacctcccctgtacttacctgttttctcctcccccatccctacccttgtccacaggctcaacatttctacacgttgcccatcatcccttcttccatccttagagggacccttccaaggtcccgaccccatccctatccatagtcctggtccccagaaactccaacccctgcccttcctcttcccccttccaccctcacatccccatccccttctagcctttcctagcaccctatgatttattcccttgagaggagtgttccctgatccctgtgcctcttcccatctcaaccaggatcctgatgtatgaggaaaaagcgagagaaaaggaaaagccaacaggccccccagccaagaaagctatctctgagttgccctgatttgaagggaaaagggatgatgggattgaaggggcttctaatgacccagatatggaaacagaagacaaaattgtaagccagagtcaacaaattaaataaattaccccctcctccagatcaagtcagcttagtttttatttgggtgatttttttcctgggtttgggaaggagagacaggtcttgagggaaaggtggcaaggatttggccatatgaacaatccatcaacaacgctatagtgtgtccactacagcagatggtttcacgcaccaagggggattccagctgtgtaagacagccttaacctcaaagaatgcaggcaggacaaaaacacatgtccaaacaaggtactcaggcccatgacagatttcatgaagagcaaggaataccatgaaccaacattctccaccactataagctttgtcactttgacaaatcactcagcctctgtgaggcttttttctaaaaatggggataaagtgacctatgctattgtgcctgacatatcataagccctcaataatgtttaaaacttgaatgagccggggccgatggcttatgcctgtaatcccagcactttgggaggatggggtgggcagatcacctgaggtcaggagttcgagaccagcctgacgaacatgaagaaaccccgtctctactaaaaatacaaaattagcctggtgtggtggcgcatgcctgtaatcccagctacttgggaagctgaggcaggagaatctcttgaacccaggaggtggaggttgtggtgatccgagatcgcatcattgcactccagcctgggcaactaaaaagcgaactccgtctcaaaaaaaaaaaaaccgaacatacaaacaaacaaaaaacacttgaatgggtagatgaatgaaagaactggtgctattaaataaagcaaagaatttacagctgggcgtggtggctcacgcctgtaatcccagcacttcaggaggccgaagcgggcagattacctgaaatcaggagttggagaccagcctggccaacgtggtgaaaccccatctctactaaaatacaaaaaattagctgggcatggtggcaggtgcctgtaatcccagctactcgggagactgaggcaggagaatcgcttgaacccgggaggtggaggttgcggtgagccgagatcacgccatggcactccagcctgggtgacaagagtgagactctgtctcaaaaaaaaaaaaaaaaaaaaaaaaaagactggaaggagaaactcattggagacaatgactatggacatcccttttaagaattttgctgcaaagggtaacaaaacggtatgtgtggtagccggccggggagaagggagaagagaatcattttggaagtttgaaaacagaagtcatcttaaatcttactgagcctctgactaaaattctcatctgatttctgcaaacttttctgccttcacttttcataatgaataagccgcctcctttatttagccatatcagcctaggcacaggcccccaaactcatgcctccactaatctgttctctgcacctgagatgtacaccttcttctgaaacttgggtaagttctaactcgttcttcatatctatttatttatatatttttgacagatatctactccgatcattcttcatatcatttttttttttttttcctgagatggagtctcatgttggccaggctggtctccaactcctgacctcaggtgacccacccaccttggcctctcaaagtgctgggattacaggcgtgagccactgctcccgctcccggccctttttttcttctttttcttttttttttttttttgagacgtagtctcactctgtcgctaggctggagtgcagtggcgtgatctcagctcactgcaacctccgtctcccaggttcaagcgattctcctgcctcagcctcccaagtagctgagactacaggcacgcgccaccagtccagctaatttttgtatttttagtagagacggggttttgccatgttggccaggatggtctccatttcttgaccttgtgatctgcccgcctcagcctcccaaagtgccaggactacaggcataagccaccacgcccggcctcatatctcttaataagagtttttctagaaacatttctcaatcaccccaggcataatcatattttatttctctacttcttttttttttttttttgagatagagtttcgctcttgttgcccaggctggagtgcaatggcacgatcttggctcaccacaacctccgcctcccaggttcaagcgattctcccgactcagcctcccgagtagctgggatcataggcatgcgccaccacgcctgggtaattgtatttttagtagagacggggtttctccatgttggtcaggctggtctcgaactcgtgacctcaggtgatccgcccgcctgagcctcccaaagtgctgggattacaggcgtgagccaccgcgcccatccttttttttttttttttttttttttttgagacgtagtcttgctctgtcacccaggctggagtgcaacctccgcctccctggttcaaggaattctctgcctcagcttcccgagtagttgggattacaggcgcccgccaccacgtagggcaaatttttgtatttttagtagaaatggggtttcatcatgttggccaggctggtcttgaactcctgatctcgtgatccacctgcctaggcctcccaaagtgctgggattacaggcgtgagccaccgcgccaggccttatttctctacttctataatatcctgtgcattatctccagcgccttcaaatcatagtcattgaatgatctgttgaatgggtataactctgatgggagcagagagttctagaatcgggtagtaagagacaaaggagggtaacagtactgcatttcacaaaatgaaacccattgttaagaaattacaaattcccaataatttcaaatataaaaatttattcatgaaaattataggttataaaattaaatgtccgtcttagtcgatggttgcccatattttgatgaacgagtcattcctagcctatctttgttcaaatgatttgcatacattatgcaaataggtagaactgcccgaagaatgcctacgctgcgtggtgcggacgaaacgcttcccggggcctttggattggtctgtctagccacctcatttgcatgacgtaatataataactggaaggccccgcccctctggtgcatttccccgctccaaccacctcctcaaactcacggcaaagggatgcgagagctggaactcttaccaggcctgcggaaactcagccctccggcagctaatcccgcccgccagcccccgtcctctctctctttctccctagctgaaggcgccacgggccgtgtgtcgttgccttccacttttggcgtcccaacgtctctccgctcccatctttctactaacgtccgacgcacgctccgcctctttctcccacattcgtcgtgtaaattctgcgtcccaaccgcccagccgacctgcaccgcattcccgccccctcaacacggctcaacggccgacgctgggggcccgcctccttagccaatcggggtcctagtgcccttaagtccctcctctttatgcaaataacctccgcatgctccgcgcgcccggcccttttttttttttttttaaactaaagacagccctggaagtagagggttagggtagaaagtgccccgccctttatgcaaattaaggggcgtgtctaggcgcggagggaggtgggaggtgggagggggtgctcccgggggcggcggttgcccggatgggccgttagtcggggctcagccgcggagtgagcgagggagacgggaggagccgaacccggcgccatccgccgccatcctcccccgccccaccgccatcccgtcccggggagcccctaggcccgggtcccggatccccgcgcacccggccaggtgagtctgggtgaaccgtgcgctgacgcccttttccggcgcgggagaggtggtggcggtggcggtggcggcggcggcggcggtggtgggccggggggaggagaagctgccattagccgccgccattttgtcctcctgctgccgggcctgcttgcccctccccctccggtacctctactccgggacccgcacctccggcagttcattcaggatccgtagtctgcccctaaccacccaccgtcttggcttcagggggtgacccctgcgcctgggtccgtaactccctaccctccgctgcgctcctggcttttcacccccatttgtgggccccctccccggctgccgccccgtggtggtgggccgcgcccgacggttctctcggaagggcgcttttcctccatattggaccccctcctatcatccagcgctgtgttcccccctctggacgcccctcttcgtgtcgagccactcccactctagaatcctgcttttatcccagcatctttgctttctatgttgctcagtcgccctatgtctgctttttcatttttcctgttcctcgtctcctttctcccccaaccccgtttttcttcttgggcctctgcccccttacttcgttgtctacatcctttttttttttgccattcctgtttccatatattttccacctgctttcgtattcattattttctgttagttttggtctattcgctacatgactcttgtattcgttttcccttcatatatttatcttcacagattggcctcctcaaacacctacgaagcaacatccatcttatctctagcttgtcataaagttctttctccccaattttagctttcattctgggcctgtctggatttccctgctttcttccccactatttctcatctctttacactgttcccgtccataaacgaatgcctggtcactctggaatggactgagagacctgtcgtccggcttgcttagggagctggaggtatcgagtaaagaaacactggtgatggacatttttaatgaggataggaaaacgaagatggctctggccttggccctctgttttctggcccatggttacagggtgctaaggtggctccataatgctttttctcagttcttcatatggtaaaacagtatttcatctggaggcgattttttccaggagccaatacaggagcaagtttaggaaaagatgggatatttcaaatacttgaggttcctatagcctgggagtatgtacagccctagttgttctatgaggatttctctggtaccaacccccattccggctgagcaagctcataaaatccttaaactcccagcataccttcctgcaaaccttcccagatggacacgaggctgctgggctgggagcctggggtacagggccctgggggcatgattagggagcttgtgtccaataaacagggaatctaaagtgttgtttcttcttctctgatggaattgtatgcttcttttttagttttctcttgcttgaatttgtcctgttgtaagtctctgaaacgattttggtggagagagaagagattattacttgtagggaattactctttgtagacaggcacaaagggcagagtgtttatactaggaggatgctggatttttacttagatttccttgacaaaggtgtctgggggaaaggagggaacatggcatttgagctatgagggagctaagtagatcatggttgcttaagaagagtgggcagtttacatagactggaggaaaagacaccagagggcctcatatctgagtccctaatgataatgcaatggagtttttaagtttctgttatggtctgtacaggggacagagactgagacacttgctgtctggcccacaggctctggcacgttttgggggaggtgcctgcaggacccaacatactcaatgagcttccagcgcaatgtccgatcgctcggggccgactgccaagggaaaggatggaaagaagtattcctcgctcaacctgtttgatacgtataagggcaagtccttagagatccagaaacccgctggtgagagtcctgcaaagatgcttctgatggttgaaagctaggcatgcatggggcatacgttttagagctctttaaagggaagtggctgtagtagaaataccaaaagactagaggagatttcccaactttacactgggtcctttaaagggggtgtgggctctgggtgaacaccagttatcctcctacaaaggcgtgtctgtggttccctgtctttggacacgtaagaattggaggaaaataaatgtggatttgggaaactttgaggccagcttgcttcttgcaggctcatgatcaaccaatctcacataaaagtattgaatgttacatatctcagccttcttgatagggatttcatagattttttttttttttttttttttttttgagaccaagtttagctcctgttgcccaggctggagtgcaatggtgtgatcttgacttaccacaacctccacctcctgggtttaagcgattatcctgcctcagcctcctgagtagctgggattacaggcatgcgccaccacacccggctaattttgtatttttagtagagacagggtttctccattttggtcaagctggtcttgaactcctgacctcaggtgatccgcctgcctcggcctgccaaagtgctgggattgcaaagtgtgagccaccacaatcagcgcgatttcagagattattaagggcaggggaaggaatcccttctaagagaagtttggaggaagtaggtaataaaatattcaacatgtataaatgtgtcccaggataggaggccatcagatctcccacatgaggcattttcgaccctctctccgtcttgttctccagttgcccctcgccatggcctgcagagtctcgggaaagttgccattgcccggcgtatgccacctccagccaaccttccaagcctgaaagccgagaacaaaggcaatgaccccaatgtctcactagtgccaaaagacggaacaggatgggcaagcaaacaggagcagtccgaccccaagaggtagacagaggcttgggggacctagagtgatgggtattttaacttgaacttcagggagcattggggcttggtttagtccagccacgtctgagccagagacgaagaggtccctttcttacctattgcaggttccttgttaaatgactaaggaatggtactaaactttagctttttgtcttggagagagagcatgaaaaaatagacaacagcctacaaaggatgacaaaattaatttgtccttatatttgtaaatggtagcaatgggcatgatttcagtcctgagtctccaccagttggagaagtcagggaggcatctcaggtgtgaataaccttcccattctgtcccctcagttccgatgcctcaaccgctcagccgccggaatcgcagccactgccggcttcacagacgcctgcctccaaccagccgaaacgacccccagcagcccccgaggtacctggagaactggaggggtggggaggaagaatggttcatagctgccccacccacatcatttatcatctttctgaacacttccccagaacactcctttggttccaagcggggtaaagtcctgggcacaagccagcgtcacccatggagcacatggagatggtgagtgcagcacttaattggggagctgtgtctgggcaccatgggatgcatgaaccctgcactgtattttcagccaagtgaccttggtcctctttggctaaatcaaggaccacccatattcagtttcatggaggcacatgagcaagtttaagtctcagtcttatatgatggagtgtagtggtgccagaactgacctccttggggaataagcagttattctgtaggggggtgagtttgaaggcgggaaacctgatggtctggtacctgtcagagccttccactttttttttttttgagacggagtctcattctgtcacccaggctggagtgcagtggcgcaatctcggctcactgcaacctctgcctcctgggttcaagcgattttcctgcctcagcctccagagtagcgggactacaggcacacgccaacacacccagctaattttttgtgtgtttttagtagagatggggtttcacatgttggccaggatggtctcgatctcttgacctcgtgatccgcccgcctcagcctcccagagtgctgggattacaggcgtgagccaccgcgcccagccagagtcttccacttttatagcatgtcctcaggaaatgtcttctgtctcctgttctgcatccccatcctaataggtggaagggcatcaagcctactgtcacgattctctcgagaggaatttccgaccctgcaggcggctggcgaccaggacaaggctgccaaggaaagggagtctgccgaacagtcgtctgggcccggaccaagcctccgcccccaaagtgagtggctgccttttggccaagacattacctattgcatctcagagctaggtgctggcttattcaccttcctccccatcactttcagctgtgttcacttgtcctccaatcattgatacctctctctaccttttccaaaatacagattctacaacttggagggacggaggtgggcgtggccctgatgagctggagggcccggactccaaacttcatcatggtcatgatccccggggtgggctacagccttcaggcccaccccagttccctccctaccgcggaatgatgccgcctttcgtgagtcttggtgtcttgtcttggaacgattacactggaagctggagagctaggaatcaggacttagtctttgacctatgagatagaagggagggtgggaggatgattgatagcaggcttaaggagctagaagggtatatgactgtccctctgagcagctactgttggacccttttacagatgtatcccccatatctcccgttccctccgccctatggaccccaggggccttaccgataccccactcctgatgggcccaggtgagcaatccaggtctgggtttgtggctgggggcaggggaagcttattgggggaggagatggttttctagccaggaggctcagtctaggatcagtctcgcatgtggttatacaacatgccatatttcattttcttttttgtgtacagccgttttccccgtgtggcgggcccccgaggctcagggccaccaatgcgcttagtagagcctgtgggtcgtccctctattctcaaagaggataatctcaaagagtttgatcagttggatcaggagaatgatgatggttgggcaggtaagtggatattaagggtcaagaatttggatcttgaaaggcaaaacctaatgaggaaaaaaaaatacagggttatgtgggtgaaaggcagacattgaagtgtaggaagaccaggcccaatggctcacatctgtaatcccagtgctttgggagtgttaggtgagaggatcgcttgaagccaggagttcaagaccagcctgggcaacacagcaagaccccccacctctacaaaaaaaaaaaaattttttagttgggtgtggactgtgcatctgtggtcccagctactctggaggttgtggtgggaggatcagttgagcccaggagttggaggtcacagtgagctatgatcgtgccactgaactccatcctgggcaacagagcgagacttttaaaaggaaaaaaaaaaaagagtaggggaggatggatggggaataccaagtccttgcaaagtggtgagaggagtaagaatgacaagacttcattggtggatctagacttcggagggaaggatattggcattggtagtccatcttgttacatagttccagactacctcccaagattggagggcagaatgcttgggttactaatactcatatttcccctcaggggcccatgaagaggttgactacactgaaaagctcaagttcagcgatgaggaagatgggcgagactctgatgaggagggagctgagggccagtgagttagggccatcaggggagaagaggagggggtcttggtttgtattttggtaatatactcttagaggagtatattagttgcagctgattttaatttcactgttgatctgctcacagcagggattcccaatcagcttctggtgaggaacggccccctgaagcagatggcaaaaagggcaactcccccaacagcgaaccgcccactcctaagacggcctgggcagaaacctctcggcctccagagacagagccgggacctcctgccccaaagcctcccctacccccacctcaccggggccccgccgggaactggggcccccctggggactacccagtgagtgtctccaataagggattgagagggtcagctgtgggaaattggtgtcagctgagtaattgaagcggttgtgatatagaggaaggggggtgctaaaaatgggctgtgtgaagtgccaggctgcagaacatcctgggaagcttttaaatatctttggtaataggggagtctgggtaagaagtgagaaactgggatgctaatgaggaaagaagaaaaaggagccctgggtgtttgggtttcggaaggagagagggaacagaaaaataaaaagactagggtggctagatagctggatctgttagtatgcatcagtagtccaagctactcagcaggctgaagcagaaggatcacttgagcccaagttcaagaccagcctgggcaacatagcaagacgtggtctcaaagaagaccaggataatgagtttgtcaccacccagagagatcaaccccaaagcctgggtcgttgcatcctgcaagtagcgacagttgatttgttgtaaaagagatgatagaaagcatagtaactgattcccctggccctgctgggtcttgccaattgacaggatcgtgggggtcctccctgcaagcccccagcacctgaagatgaggatgaggcatggcggcagcgacgaaagcagtcgtcatctgagatttccctggcagtggagcgggcccggcgacggcgagaagaagaggagcggcgcatgcaagaagagcgccgggcagcctgtgctgagaagctcaagcgactcgatgaaaagtttggggcacctgacaagcggctcaaagcagagcctgctgccccacctgctgccccttctaccccagctccaccacctgcagtccctaaagaactccctgcacctccagctccacctccagcatcagccccaacaccagagaaagaacctgaagagccagcacaggcccctcctgcccaatctactcctactccaggtgtggctgcggctcccactctggtgagtggtggtggcagtaccagtagcaccagcagtggcagcttcgaagccagcccaggtatggagatggggataggtactaccagatgtcagatcactgcttcaaggtgcttaaaggtgcagggtggtaaggctggggataaatgaagtagaaggcagttgttttggtttattggactatcagtgatagtgttctatcatttgtatatctgaaggagggaaggttttgtctggaatcttaggttgtagtctaataccatttcttggcagagtactgtagctcacgcctataatcccaacacttagggaggcttggggtggaggatcgcttgagcctagggagtttgagaccagcctgggcaacaaagcaagaccctgtcggccaggcatggtggctcacacttgtaatcccagcactctgggaggccgaggcgggcagaacatgaggtcaggagttcaagatcagcctggccaacatagtgaaacccgtctctactaaaaatacaaaaattagccaagtgtggtggcatgtgcttgtagtcccagctgcttgggaggctgaggtagtagaatcgctttaacccgggaggcagagatttctgtgagccaagaccatgccattgcactccagcctgggtgacagagcaagactctgtctcaaaaaaaaatcctgtctcacaagaaatacataaataaaaatgaaaactatttcctatgggccaagactgaagaaagtactgttgttctaatggtttcatagaaagttaatgccaccaccataggctcatgagaggccatgaagtgctttaatgggtcttaaatgggaggggcttcaatagaatagatgttgaatagaatattttagtcttaagggagctagagatgagacgtgagattcctggggtgttcatggagtgtctattgttggactagatcactctgttgtgttttttccgatgcagtggaaccacaactgccctcaaaagagggtcctgaaccaccagaagaggttcctcctcctaccacacccccagttccaaaggtggaacccaagggtgatgggattggtcccacccgccagccccctagtcagggcttgggctaccccaaatatcagaagtcgttgcctcctcgtttccagcggcagcagcaggtgaaatcaagttgtttaccctctaagggctgcttttcttcctggcttcggtccctaattctcttcataagttaccttctgggtccctttgcttctttgtccagttgtctccattgtcacgccaatttcccctagtccaagttttttctttgctgattcctttgtccatgtgtgctttgagcctctctcatcttgtctttcctcctttcctaggagcagctcctgaagcagcagcagcagcaccagtggcagcagcatcaacagggctctgcccctcctaccccagtgcccccatcaccaccacagcctgtgaccctgggggctgtgccagctccacaggctccacccccgccccccaaggccctgtacccaggtgctctgggccggcccccacccatgcccccaatgaactttgatccccgatggatgatgattcctccttatgtggacccccggctcctccagggtcgtccccctctagacttctaccctcctggtgtgcatccctctggtaagggggcatgggaggagtgagaaacaggaaagtcccctcagtcttaggcattggatattagggtcttactgtgactctggtatgataggttttgcccatcatagtgatgagggaagggcatatgcttagcactgctgagatagctctgttgcaaaaatgggcttagttaagaaataagcagtggttggccaggcattgtggctcacgcctgtaatcccagcacttagggaggccgaggtgggcagatcaactgagttcaggagttcgagaccaccatggctaacgtggtgaaaccccatttctactaaaaatacaaaaaagtagccggcgtggtggcgctcgcctgtagtcccagctactcgggagactgaggcaggagaaacgcttgaacccaggaggtggaggttgtagtgagccgagattgtgccatcgcactccagcttaggcaacgagcgaaactccgtctcaaaaatgaatgaatgaatagcacaactccatctcaaaaatgaatgaatgaatgaaagaagcagtggtccttcatttgccaggatttatttggggtgggttgattctcttgtagggaatctgagtggataaccttgttatataagagcaggcaaggcccggacctactgggaacaagagatggaagagctgacttgaccgcaaggggagatgctttttgggctggagggcttgtgacatgaataggattatttttctttttctttggtttcttcaggcctagttccccgagagcgttcagacagtgggggctcaagctcagagccatttgaccgtcatgcacctgctatgttacgggaacggggcactccaccggtggatccaaagttggcctgggtaggagatgtcttcaccgccacacccgctgaaccccgcccacttacctcacctctgcgccaggctgcggatgaggatgacaaggggatgaggtgagtcttggtcatgagaaatgggtgagttcacagtgaaaggatctaggcctgggagaaaggtactttgggttagtggtagggatagggatgaacgggaaaggagaggctggatggagtggctcatgcctgtaatcccagcattttgggaggctgaggcaagaagattgcttgagcccagcagttcgagactagcctcggcaactggatgccatctctgccaaaacaaacagaaaaatagtaaaagagagtctgcatcataataaagtgttcttttcccacctagttctggttttcctgagatacttatttccattctttctgtctgtctcttcaggagcgagactcctccagtacctcccccaccaccctatctggccagttatccaggctttcctgagaatggagcccctgggcccccaatctctcgctttcctctggaggaaccagggccccgtccactcccctggcccccaggcagtgatgaagtggccaagatacaaactccaccacccaagaaggagccccctaaggaggagactgcacagctgacggggccagaagcaggccgaaagcctgcccgcggagtcgggagtggaggccagggccccccaccaccacgcagagagagtcgcacagagacccgctggggccctcgtccagggagcagtcgtcgtggaatccctccagaggagccaggggccccaccccgccgggctgggcctataaagaaacctccaccacctacaaaagtagaagagctgcctcccaagcccctcgaacagggggatgaaacccccaaacccccaaagccagacccactcaagataaccaaggggaagctagggggccccaaggagaccccacccaatggaaatctttcccctgccccaaggcttcggagggactattcgtatgaaagagtgggtcctacctcttgccggggtcggggccgaggcgagtattttgccagagggaggggttttcgggggacctatgggggacgagggcggggagcccgaagccgggaattccgcagttaccgagagtttcgaggagatgatgggcgtggaggtgggacagggggaccaaaccaccctcctgctccccgaggccgcactgccagcgagacacggagcgagggttcagagtatgaggaaatccccaagcggcgccggcagcggggctcagaaacaggcagcgagacccatgagagtgatctggctccttcagacaaggaggctcccacacccaaggagggaacactcacccaggtccctctcgctcccccaccaccaggagccccaccttcaccagccccagcccgcttcactgcccggggtgggcgagtcttcactcccagaggggtgccatctcgccggggccgaggaggagggaggccccctcctcaagtttgcccaggctggagccctccagccaagtctctggctcccaagaaacctcccacaggccctttgccaccaagtaaggagcctttgaaagagaagttgatcccagggcctctgtcccctgtggcgcgcggaggcagcaatggaggtagcaatgtgggcatggaagatggggagcgaccccgaaggaggcgacatgggagggctcagcagcaggataaaccgcctcgtttccggaggctgaagcaggaacgggagaatgccgcaagggggtctgagggcaagccctccctaacccttccagcctccgctcctgcacctgaggaggccctcacaacagtcacagtggccccagcacctcgccgggcagctgccaagtctcctgatctgtcaaaccagaactcagaccaagccaatgaggaatgggagactgcatcagagagcagtgacttcaccagtgagcgccgaggggacaaagaggcacccccaccagtactgctgacacccaaggctgtgggaactcctgggggaggtggaggtggagccgtaccaggtatttcagccatgtcccgcggagatctgagccagagagccaaggatttgagtaaacggagcttctcaagtcagcggccaggcatggaacggcagaatcggcgccctggcccagggggcaaggctggcagcagtggcagcagcagtggaggaggcggtgggggtcctggaggaaggaccgggccaggacgaggcgacaagaggagctggccctctcccaagaaccgaaggtgggtaggaacaaacaaatttattgtggtttaaaaattggaggagggggaaaaagcctgagggaaagataagtttgggtggagtggagattgtggcctgaggggccatgggctctagaatgtcagtaggatttccatgtctggctaaggcaactggaaagcggttggtagggtgttagagtcaagaacacccacctatgtattcattgctggttctttgctttccagtctgtgcatctgtacgcataggaacccttagaaggactcaaaaacacctggactttaatagggaagagaataggttgtaagcagaagttgggaaacataacttgtgggaaaaagtaacgatttagtggatactggagctaatgctctgttttctccagtcgtcctccagaggagcgtcccccggggcttcccctgcctcccccacctcccagcagttctgctgtcttccgcctggaccaagttatccacagcaaccctgctggcatccaacaggctctggcccagcttagtagccgtcaagggagtgtaactgcaccagggggtcatccaaggcacaagcctgggcctccccaagcccctcagggcccctctcctaggcccccaacccgatacgagccccagagggtcaacagcggcctcagttctggtaagctggaggggttatgggtgggaatatctccatccccagagaaggtcaagtgctggagggagcgggtggagaacctggcctaggggccctgctgctgggtgcgtttctgcagggagcaagggtagaagaattgggaggtggagtagagaggaaaagttagggtcagtggcagagccaggcagatgctgaccctttttctctttcccagacccccactttgaggagccggggccaatggtgagaggggtgggtgggactcctcgggactctgccggggttagtccctttccccctaaacgtcgggagcggcctcccagaaaaccagagctgctacaggaggtaagggatgggtttgagattgtgcttcactgcactcttactcgtgaaaattcttctgggttatgttttctctgttttctttcctgtttctttcactgtgtttttactccagaattctcagtattagtctcccatgtgtctcccttgttgtccccacaccctgtgtcaccccactctgtcctggcttcctataattcccaattcccacccaattcatgttttgcttctggcccttctcatctgtaggaatctttgccacctcctcatagctctggattcttgggctctaagcctgagggcccaggccctcaggcagagtccagagatacaggcacagaggccctgacccctcacatctggaaccgtttacatactggtgagtaaagctgagtgaaaggactatggtagaagggttaagaatgagaggggcttctgaactgtcatctcctcacttctcttctggttggtgctcccttctccagccactagccgaaagagttaccggcccagctccatggagccttggatggagcccctgagtccttttgaggatgtggctggcacagaagtgagtgagggtgggagggtgtgtctgagctgggacttttttgagcactggtcataccccccacctgctctgggttgagtctggagctgttctctcacttggctgtcccctttctgcagtttgtatgtgtgcatcagtcaggtattggggtgctttctaccctgacttaactagctccttctccactcctctcagatgagtcagtctgacagtggggtggacctgagtggggattctcaggtgtcatcaggtccctgcagccagcgaagttcccctgatggaggactcaagggggcagcagagggaccccccaagaggcctggaggctcctcacccctgaatgctgttccttgtgagggtccacctggctctgaacctcctaggagaccaccacctgccccccacgatggggacagaaaggtaaaagaccaaaaaaggataaggggaatgtttccaggaatctgactttggccctacctttttctgctttttctctctgcgtgtgtgttctgggcattccaatttggatttccctttccctcccccaatgcactttactgtgtgcccaatccaggagctgccccgggagcagcctctgccccctggccccattggcacagaacgatcacagcatacagaccgaggcacagagcctggccccattcggccatcccatcgacctggtcccccagtccagtttggcactagtgacaaggtctgtgtgggctggatctgggtatcctgagttgggtggagagaagggaaggactaaaggtgggacatagaggacacatgtctgtcacgggacaatgtctcctgccttcttgtgatcacaggactcagacttacgcctagtggtaggagacagcttgaaagcagagaaggagctaacagcatcagtcactgaggtaagtgggagtaagagtttggtggaaaggcccaagatttctggggaagattgctgggagtgaccagggcgtccaggatgccagacatccctctccacgaggcctctccttcccaggccattcctgtatcacgagactgggagctgcttcccagtgctgctgcctctgctgagccacaatccaagaacctggattctgggcactgtgtcccggagcccagctcctcaggccagcgcctgtatcctgaggttttctatggcagtgctgggccttccagttctcaggtaggccccgcttcccattgcatgaccccttcagtgaataataatttttttctgcctggtatgtatttataatcaagcctttctacgttgcagagttgtgagataccactttgtcacatcatttttctccctactttttgcttctatgggtgggatggtgatcttttttcttgaccacagatactaaagctgtttcaaccgtgctcctctcctgcagatctctgggggagccatggactctcaattacatccaaacagtggaggcttccgccctgggacaccctcactgcacccttacaggtaagactcgatgcctgtggatcacagaagtacttggagatgtgtttcggggagagggaaggggaagacacagttctagggtactagaagctagtggacttaaggcattgctaggactctggcttcctaacagcttttctccccacaatttattttcagatcacagcccctatacctaccccccggcccagcccctccctcagcactgctctctggggtagctctcaagggccagtttctggatttctccacaatgcaagctacagagctggggaagttgccggctggaggagttctctaccctccaccttccttcctctactctccggctttctgccccagtcctttgcctgacacatcgttgcttcaggtaagaggggggcaggtattagatattgggggatagggtagggagaatgattttgtgggggttgatatatttctccctgtttcccgacaggtacgccaggatctgccatccccttcggatttttattctactcctctgcagcctggtggccaaagtggctttctcccttcaggggctcctgcccagcaggtatattgtatcttcacacttccccttcatttgatttctctgtccagttgctggctttgattttccctggttttctgacattcctccctgcccccaacatgcacacccaaatttcttgttacagatgcttctacccatggtagactcacagctgcctgtggtgaactttggctccctgccgccagcaccacctcctgccccacctcccctttctctgttacctgtgggccctgctctgcagccccccagcctggctgtgcggcccccacctgctcctgctactcgggtgctgccttcacctgccaggcccttccccgctagcttggggcgagcagaggtaaggtacaggaactgaggggctagggagcgccaagacttgggagtagggattctgtatttcaaggtaggcagctcatgatttttttcccctcagctgcatccagtggaactaaagccgttccaggattatcaaaaactgagcagcaaccttgggggacctggatcatcacggactcccccaactggaaggtgaaacggaatagggatgtggactttccaagtgcttccttactttggaaccagggtctggatcctaggcttgccttagacgcccttcttcccttaggtccttctctggcctcaattcccgtctcaaggccacgccttccacctacagtggagtcttccgcacccagcgcgtcgacctttaccagcaggtgaaggagaaacccttgtggccccaactctaaattcgagttgccacctgatttcctgtccttccatctcatcgctgacctctcactgtgactcactgtttaacacatgcctgtcccctaggcctccccaccagatgccctgcgctggatacctaagccttgggagcggacagggctgccacctcgagaagggccctcccgacgggcagaggagcctgggtcccgaggggacaaggagcctgggttgcccccaccccgctgagggagttcctcttgccccctacccccggggcttgtatatagattataaatatataagggggaaaggggtgggcggggaggggttgtggggctggggcctcacttcccctcctcccccttcccctggtcccctgtccctggggctgtttgttaaaaaagagtaataaaaggatttaaaaaaaaaaacttctacaatgatttgggggatgagttgtttgcattgtcttaaagcatggtgctgagtgatctgtagtttcagtcagggaaatattcattacttattccagtgagctgttgaaactaaaaacatgaccatcgtattggatctttaaatttttgtgagtctggaatttgggctgagctcagctggataaatctgcttttttgtgccagtgagcgaggtcaactggttatcagtctgcagctgacacctgggctggtcccaatatggcttcctttgcatatctagggccttggtgggacatctgtaacattactgggttatcaaccagtgtcttcacatggactctccagcaggcctgttaaatgtccgtgagctcatgttccaagaggtctagctggaattttctaagcttatgccatgcttagttgatagagcactaaactagccaaggtaggggatgggggggtttagaagggacttcaactgcatctcaaagggactagcaaagaatttgcagccatgggacttcagttctttatgatgaactaaggggaaatctctgttaaggcctcaatgttggagcacacttaaggggctctttgaattggatagaccaattccagcattgtcaaactaagtgggatttcacatggtaacgctgcatgctagttatgctaaagactatacttaggtctgcagctgctcagaaactttttttgatgggtaatttgagagctctatgctagtgtgcacctggaatatgctcccaactcaaaatacaggttttttatttatatataaagtgctttcgcacaaaaaatacaaacatcaggctgggcgcggtggcccacgcctgtaattccagcactttgggaggccaaggcgggtggatcacaaggtcaggagttcgagaccagcctggccaatatggtgaaaccctgtctctactaaaaatacaaaaattagccgggcgtcgtggcggacgcctgtagtcccagctactcaggaggctgaggcatgagtgagaatcacttgaacccgggaggtggaggttgtagtgagccgagctcgagatcgggccactgcactccagcctgggagacagcaatactctgtctcaaaaaaaaaaaaaaacaaacatcaaaactggcttgtacaatttagcgtgctgagtagaacacaacagtgttccaaggaagtattaatttaaaaaagttcacacaagattaagggacacactacctaatggagacaatgtagagagaaagcagccagaaaaatccgacttttatttcttaaatactgtgaaggaagaggggggaaacggtcccctgatgaggaagggccatagagcaaagagctaaggatcatcagcaaaggcccgctgggcattggggaagcgctggggactgtagttggggtcttcctgcagtcgtttttgtatatcagaccggagctaaagagaaaaagtaagcaggttggagaaacgctggccaagtccccatgatcccagcaagcacacaaggccatccctcagaagctaacatttccccccccaagcacactgtcaaatagcccggggtggcactgtcaagccttcccagatgccaaaggggaaaacaaatggtagcaccaggctgaccagttcatcgctgaagggatccagggaagagggaccctagcccaacccctcccactagaccatccctattctgcttcaaggtggcacctgctgcctgtagctctcctgaacctctggtgcctccaggtcccggctcaggctctcggggctcgtcaggggccgagctccggctgccttagctgcccggctcacagcctctgagagaagcagctgggggccctcaccctgcatcgtctgggggacagggggttgggagggaaaagaggatcaacgtcagatccagtgccaccatccggctcaccctttccatgagtcaaccactccactgagtctccatgctagtggagagaggggaaattaagagtccaggatgtggtttttacagcagaaatgccttcctaattctctttggcactagccaaaactaaagtgaatgtgcttgaacgtgctcttcaaaacgaaaggcagaaggggtcaagccatccgggattcagagctaggtaatccacaagaggaaacccaccttaaaggaaaatgggatctaagcacatggggattaggcagctgagcaactaatacaggactgctagcaaacagactaaggtcaagtcctgtatggttatgcaacaaccaagagcaagtctgaatcccagaaaaagtttcctcattaaacgaggggaggggagactgaataacaagagctcccaccatctctacatagtttgattccaggcatgacggggaaacctggatagagagagaggcttagggaagaggaaaaccaaccttgcgtctcttggcaggcataccactgaggtaggcatcactcagagggggctgcggtttcaccttccgctggctctgaatgtcctgctggataatagggacccattcctggggaggaaaagagaaaatagtaatgtccttgactttcagctgccatgacccactggattacttcctgacacttactggggggactgcagctgcccaaggttctgtctcagctgaagctccatcctgttcatcccgggagcccccctcaggagcaggaggtggacctcgggacatggcctcttctgctgttgttccaggggctggggaagcattctcccgctgggtgtcagatggcgggaagagccaggcttcagaatttttagcctccaaacctttctcccccagccctccactccacattatctggcccctcaacctccccctctctagagtacctgaggctcaggggaagctctttctgctccctgaacttccattggctcctcaggaagtggctgtgaaattaaagaacaccatacttcctctcagatctctccagttctctcaagtaccctgaccccatcgcccaacaggtcccttacctgggggggatcaccaaccctgcgaacgtatctgagaatggcatcagggcctacaggcatgtgctccagtaccacctgaagcctcagtcccatcatagtggtcagccagctcaccaaggagggattcaccccacgagacatacgacgctgagggacagaaagcagatttagaacacaaaaccctcaaccacctttagaaatagattagatccaggttacagaatgtcagtttagaaaagaaaaatgaaaactgcagagaatggaaacctcaggaaacaaaaggctaaggatctggggctaggtggtgcttacaattcggccattgataacagcagcaagctccatctgctgtccccccaagcagtgcaggtttagggccaggcattcaaacaggccttggttacacaactccagcaaccgggccccaaatccactatctgtgggcaaaatacaaggagggaatgctggcacgtggcagccctgcacatgcaacaggccccacttgcccccgcctggccagcccctgacctgtgcaatgcagcacatgcgcagcaatgctattaaactgctcttggagaaattccaggtttgtccggatgatgtccacacctggctgaacctgcaccaaggactgagagacaagataacacaaagatcccaaaatcaagaatcataagactgggagtggaggaggcagctgccttgaccagacccaggagaggaaaggaatagagaagggttactcacaaaactctcccgcacatactcttctagccccgtgatcaatgtgtgggttgccatctgtggaggaaacagaacaggtttagttcaaagcctcagtcctcccaagacttccacctcgaccccaacaagtccagggcttgtgtgggggcaattggagctttacctggcagagaagcagtcagaaataaggaataaaatgtgcaaaagaggagagttctggggcccctggccttcatttacccggatgttactgggtgtgggctcctgaccacccaggtagtgctggtggaagaaggatcgcagctggggctggagccgttgtagtggctggaaatgcccatggagaagcatcactacgtccaccatagagaagttctggcacagaagagaaagcaaggccccaaagaatcctgggggacaagggcagatgttagcaatggcctttaccacctggcctgcccacccacaaccagatcatcaacctcatcccaccttggcaacacccctaaaccaaggccatctacattcctctggctgccccttcctggagcaagccaaagcatcctttttgctcaccaagggccccatcagctccaggctcaaagatgttgctggatccactgaggcgttgtatgaaggcagcaatactttcactgctgccagcccgagcccccagggagcccagcagggagctgagcacaccctgcaccactgaggtaaaaaactccggtgacaggctctcaagacccaggcctccaggactccctgcgccaccagaaggggagcctggtgggggcatggtctgctgctctggggcaggtggtgggggtggaggaggtgggggtggtggaggggctgtctgtgttgcctggcaaataaagaaagaacaaagaacagaaagtgaggtgagaatgaagacacacggaaataatacggcatcaagagggcacaaaccaacgggtctgggaagatggggagttacattctgatcttcactgcttaaagcagaagtatggtaggtatttaacagagtcaggcagcacaacttacctacctcttcctctgaacaggctgtcagaaagcagtgacactaattactatactttctttttctaaacctcattttcttcatctttaaaatgaaaggttcagagtcaatgaattcccagggccccttcccctaacatgtcactaggggctcttacccagtggttatataatggcaagaaggtaccactgcctggctgggccgggggacaggaagatgaggtgaatggcaagccagccactcacctgcaagaagtcagtcatgccttggagaaaggcagggacaccaggcatcgccacagtgatggtgggagaagccacaccagaccctccagcccctggccctgcaggccctagcaggttccccagaagctgagagaactgaagatcagccatggagggttgaggggtgggtggaggctgggcaggccccccaggagcggggccagctgtggtagctgtgttggtggtgccagcactggcagaagcagtggcaggggctggcggtggagccatacctggggtcccctgagctgtaagaaaccaaaaaaagaaagctgggctgagcatggtggctcttggctgtaatcctagcaactttgggaggccaaggcatgagaactgcttgagcccaggagtctaggccacatagcaagaccccatctctaccagaaaaaaaaaaagacaattactagccaggagctagtactgctagctactcaggaggctgaggtgggagaactgtttgagcccaggagttcaaggttacagtgagctttaactcactggattgcaccattgcactccagtctgggtgacagagcaagactctgtaacttaaaaaaaaaagaaaaaagctggccgggcacgatggctcaagcctgtaatcccagcactttgggaggccaaggtgggtggatcacaaggtcaagagttcgagaccatcctggccaacatggtgaaacccccttctctactaaaaacataaaaaattagctgggcgtggtggcgtgcacctgtagtcccagctactcaggaggctgaggcaggagaatcacttgaacccgggaggcagaggttgcagtgagccaagattgtacactgcactccagcctagcaacagagtgagactccatctcaaaaaaaaaaaaaaaaaaaaaaaaaaaagctgaaacctgaagacacaagacactacagcagccccattccaggaaagcaggaaccaagaaaatatggaaagaactggaaagtgccagtgagcagactaggaaaggagtttaaactctgagtggggaagaatgaaaactcacccacaaggactggctgcataagaagctgccccacaaggccgctcaccatctgggccaacgaggcattggtacccagaccggcgccctgctggatagagagcaagggagaatttcagacctgcccttccatgcaccaccacaggagtctctccctagactgttacgcactagaactccccgacccttgctcaccagtgtcccagagactgggggccctccaggatgggaaggccgagcctgtggaggagtgggccgggcaatcaccacccgggttggagctgttgggaagcctggcacctgctgtcctgtgggtggcagaagagacagaccgaagagggctgagggccaggcccttgccagccagctgccaccatggactgtgccctacctcccaagcctccccttccaggtcattacctgcggccgcggaggcaacagctgccaccatggcctgatgagtgatctggtgggcgacggcgtgcatgaactcagggggcagggagggcagctggatgagggtggagcctggggggcgggtctgatgtaaccttgaacctggaccccttcaacccacccactcagcccttccctttctctacccagagctcagcctgccctgatgccctcactcttacccagggtttggccatgaccagggggtcccagggggccagtgggagcactcggaacaccaccaggctgtgtgccagaatctgggcagggagacagagacagtggccctgaggtaggtagggccaaggcctaactatatccttctgagatcaggcatacttcaggcccataatcccccaatcagaaagcctgcctttccctccatctaaacagggagaggtactcccttcaccacacaaacacacctccaaagacaaaccaacccccacaccccccacatctgtctacttaagcttctgctctggtccccaggctaccaccaccagcatgtgcctctcccttccccaccctgttccctcacacctcagcatgaacctccctcatcatgctgatcctgctcttctcgccagcaactattctcaccttgaatgttcatgtgcatcatgaccacgggttccacactctggtgggaaatccggatgaccctcgggtggctggtggctggcgggggagctggacctggcgggggagccccctcagctgaggactcgacattggtagaagacggagccacggatgaggcctgcccaggaccagggggaggtgcctctgcattgggagttggggggggccgagtcccatttcctgtcatggtcacagtggttcccacattgatctgaaaaagacagatggacaggcagatgtgagaaaaatacaagagcctaaccaagaaaacctcatgataaacctctaaagtatctccagccttcatcaccatgtttccagtctcctcctttcctaacctccttcaggcccagtagctaccctgggtcactctatcaacacccctcactctccctcaggccagactccccctaacccacctgtatgggaatggctgcctgctggagcaccatgggggtggtgtagtgagacataggccggaccacatgcaggtgtcgtgggggcgtgcaggccagattgcagcgcaggtcagacagtgcaacaaaggtgttgcccagcagtcgcaggctctcccctaccaagttgatcaaccgctgatcctcctcccggccctcgtgctgcgcacaaccagccaaacacaaaaaggcagaaaatatcaagctggagtccatctcactaataaaagcaataatgcctactgagaataccatgtcctccaaaactttcagttatatccttggaagtttacatgtagaccaaatctttgcaaataaattatatcttattcacataaggaacatcctattaaaacactactatgaatcagtaagtcatcatatactgatctcctgtactttacattttctaaattcattcaggggcacaaggggtacgatacgaggacagtgcttacagcaaagattatcaccttctctgtaagggaggacaaaatcacttacaggtttagagagaaattgttttgttgcaatgtgtgtttttttgttttgttttgttttttgagacagtctcgctctgtcacccaggctagagtgcagtagtgcaatctcggctcactgcaaccccctcctcccgagttctagcgattctcctgcctcagcctcctgagtagctgggattacaggtgtgcaccactacatccagctaatgtttatattttcagtagagatggggttgcaccatgttggccaggctggtctcaaactcccaatctcagatgatccgcccaccttggcctcccaaagtgctgggattacaggcgtgagccactgcacctggccctgttgcaatgtttttccagggagggaaagagttatctgcatttcagcctgttctgttttgggagtactggggctgaggagaaagggcagggccatcaaagggctcacattgttattgtagtccgtggtggcagcagcacccagaacctcgtagtagcgctgcaagaagggctggaggcgactctccagccgctgtagctcctggagcacctcgacatactccgcaggggaaggatggctgtggacaaacccaaggggcaatgagccaaagccttcctcagattcccaccctcacagtcaacagggaccacatgtgccctctttctccctggtctcccagagccctggcccaatccttctctggaccagcagagcttctattctcttcaacctccgcctcccaggttcaaacgattctcctgcctctgcctcccaagtagctgggattaagttgcctgccaccacacccggctaatttttgttttttttttttttttttttttttgagacagagtctcgctctatcacccaggctggagtgcagtggtgcgacctcagctcactgcaagctccgtctcctgggttcacaccattctcctgactcagcctcccgagtagctgggactacaggtgcccgccaccatgcccagctaattttttgtatttttagtagagacggggtttcatcatgttagccaggatagtctcgatctcttgacctcatgatccacccgcctcggcctcccaaagtgctgggattacaggcgtgagccactgtgcccggcctgtattttttagtagagacagggtttcaccatgttggccaggctggtctcgaactcctgacctcaggtgatctgcccgcctctgcctcccaaagtgctgagattacaggcatgagccactgcacccagccaaagcttctattctttactcccacccatgagaggatagggagaagaaaatgaactgctcccaccctccccaccacaatcctgcacctacaatggtgaaagactaattctaagaaagagagcaggccttcgtgaactcagaggagaattccgatcaggctcaggagataccatttggatttccttgccatagggagagcagcagttcttctcagctgcctgtcctagcgtcatttacctataccgagagagcccctcctcgcccctcaatgctaacccttcaactaagacctccaagtaatcctttccctcccttgccatggttcatttccttctccccatacttcacttaggattccccacccactaaagattccctccatctctcacttgggtgcatttgtttccggggcaggtgttgggcccgctggggctgggccaggagtgagctccgggttctgggctggggcacgctcctccacttcttctgcctccatgggctcccggggaggtgcttcactttcaactggttctgatgtttgagagctcaaggctactggctccggggtcacagccggtggctgcgggggcggctgactgtgctgcggttggggccctcctcgacactgaaggtaggggagagtcaggataccaaaggcagggtaagactgctgcagaggattactctacaggagactgaacagagaaagtatcctaactagactccctgaaggcatggctctgcaattttatctccgactcgctagcaactagcataagactgacacaaattagatgcataataagcatctgtaatttttttttttttttttgagacagagtctcgctctgttgcccaggctggagtgcagtggcatgatctcagctcactgtaacctccgcctcccaggttcaagaaattctcttgcctcagccttctaagtagccaggcctacaggcgcgtgccaccacacccaactaatttttgtacttgtagtagagacagggtttcaccatgttggccaggctggattggaactcctgaccacacgttatccccctgccatggcgacccaaagtgctgggattacaggcaggagccaccacacccggccacagcatctgtaatatttgtaaataaatttctaacaaagagtagagattgtggtttcctttcctccacaagttggtttcccagcctccacaagttaagagagtagaatcctttaattgaaaagagatgccatgagactaagtctgaaacaaactccccagataccaggcaccaagaggattggcagaaatgagagagcctcacaaagatactttttctgcccaaaagaatgaatactgcagagaagactagattatgaaggccaaaccctgtgaatgtggccagtgaagccctaactcccaggctgagagaaaagggagagggagggtggagagagaccctagccagccttgcccacttacctccatccgggatagtaaggtctgtatatccctgatcatgtgctgagccatcaccagccgtacccggggctcactctacaatgagagaaggtttatcagggtaggttacagatgaagccatgagttctaccacctactaaatcaggtcccagccatctctcagccaggtccaccccacctcccagcctccttctcccagatccccttccctgaccctcggaggcccctcaatacctgaatcggggcctgttccatgttgatgtgaacatccacagcagagccgtcactctggggaaagggtaagggaagttgttctgggagaagccaacactaaggcctccacacctccaattcattccctggagccctacctccttttctccttaaagactgagaccaatagcacaccacagggccccctgaacccaatctaaagatggaagcatctatcttattaattccctggtgctaccacaaccaaagctacccacaaaagccctcccctgtggaacataagcttacaggaagattgaaggttccaaccatgacatagctgttggcattccggtcatgaacagaggccccaggcccccgagtaccagggggggatcccccaccatgagtggctgaggcagaccccgtcccagaagatgccccagaagggaggtgagtctgaggaggagcccgttccaccaggtggataacctttcccccaacatctgcagaaaaatagacacacaccaaaacatagtatgaacaggtaaacccatggcctcagttcatccctccagacagtagccccaacctctgaactgcctccccagcccccttactgtattcctgaagcttcttatcatcttgcagaactcgtccctggtaaatgagccgttgtttttcagatgggatgctgacagaggcagcaatgtgctccttaaactcttttacattcatctgaaaagaagaggcatgcacaggaatggaaagaatggaggaaagaggaagaacaaagacagacaaccgagttgtggaggtgaggggtaaaaaccaccacagaatcactacccgtttgtcttgaccgtgagatcattactgtgcaaacccttaaactaaagtaacagctgtcaaaatacagacaataaatttggcttggcgcggtggctcacacctgtaatcccagcactttgggaggccaaggcaggcagatcacattaggtcaggagttcgagaccagcctggccaacatggtaaaaccccttttttaccaaaaatacaaaaaaataagccaggcatggtggtcgcctgtaatcccagctactagggaggctgaagcaagagaatcacttgaattcgggaggcggaggttgcagtgagccgagatcgcatcactacactctagcctgggtgacagagagggactccatctcaaaaaattaaataaataaacttaatgaagctcaggttatagatccaggaaaaataacacggatgaaaaacaaaaaaaaaccacatggacattatattatctgtctggcatccaagggagtatgtgtctagagacatcagtgacccctttccaaacacaagatgataccagtttatttaccagactctcctgtgatttccaagattaaaaaatggcaaagaagatggggtctggtatcaggttactgaagaaagactaagaagataagaaagcaaaaaaggtcccagcacagtggctcacacctgtaatcccagcactttgggaggccgaggcaggtggatcacctgaggtcaggagttcaagaccagcctggccaacacggtaaaaccctgtctctactaaaaatacaaaaattagccgggcgtggtagtaggcgtcgtctgtaatcccagatactcaggaggctgaggcaggaaaattgcttgaacccaggaggcagaggttgcagtgagctgagattgcgccccagccctccatcctgggcaacaagagcaaaactccatctcaaaaaaaaaaaaaaaagcaaaaagagaaatatttttcctaactacaaactgactcttgggaagtaccagagtatttatatacatctaatcacaagtctatatatggctttcttatatccaggtagtatcacattttagaaaaccatggaccaccccacatgcaatttgtctccaagtattacaggagtaaagacacagatagctatgtccaaggctttaagctcaagagactcaagctatgccataaaaattagtaatttcactcaacagtctatcaaggacctatctccattatgggttctgatttctaccctttaaaaacacagcatagacctgaccaatgtctatcagtaagacacacttgcttagggttcctgtgctgtttcccttcccaaaggccagagccatgcctgtccctttgggttggggtccacccatgatgatgacacacagattcttccttcctctgtatttccctctgcattaagttctatccatgtggaggacagaacaaaatcagcctcactcacaaaacatcagaaaacgttctactggaatacgaacaaagggatcaataaaaagaaaatctgaggccaggtgcggtggctcatgcctgtaataccagcactttgggaggccgaggagggcacatcacctgaggtaaggagttcgagaccagcctgaccaacatggtgaaaccccgtctctactaaaaatacaaaaatcagctgggtatagtggcacacgcctataatcccagctactcaggaggctgagataggaaaatcgcttgaacccaagaggtggaagtttcagtgagtcgagatcgcgccactgcactccagcctggaagacagggcgtgactccatctcaaaaaaaagaaaaaaaaagaaaatctggtgaccagaaaatcaagctcatctctcaggctaaggggcctaaacgaggaaaagctaaaggtgtcttccagaactagtgaggtgtctcacctgggcccccacaataaaggtacgagtttgagagtccaaggtcttcaccaacacctccaagctgtcaggctcctccacagcggtactggtactatcattaggctccatggccgacaggtctctaaagaagaacgaaggaaggaaggcccgctgttgcccagaccagagtgtacccgaaagactccctagcattaatccctgccccaatacctaaaaagtttctcctgcacacacacacattcacacctgtccccatcccccttctgattccggggcacagggagagaaacacaaagggcaggagatcgacggcttagggagctggaggacgagaggtgggaggggctccacgacgccaatcacaataagcagggagccagtcagattaggaaggaagcacgagaccagagactagtgtcatcaccggtcacggcaggacaagcgccccagaggtcggaaaatcctgggacaacgcgaaagcggtggtcgccccacactctgcggagaaagtggtttcgcgcacgcgcgccacgcccatcgaaccctcctaactcactatagacccgaaacggcactcacggggcgacggacctgctagctgactgcccgcgtctactgccttcccacggtgttccagcagaacggcacaactaacccacagccaaacacacacacacacacacacacacacacacacacacccaccaccccgcggctccgcccccgacttccccacggaccgtcacttccggtctcccccaaacctgccaccgacggccacttccgtttccccgatagtatttggggatctcgaagcgatacttccggctccccccaggtccccaagctttacttttgtggggcacgacgagaaagtccgcagccccaaacagtgagtttctgagggcgagtcgggccggggccggcctaggtgggagggagccgagcaccccgaggagccgccaccgctgtcgcccgggggaccgtactacgcctgcgtgcgtcgcactacggatgcgtggacacttaagcatcgccccaccccctcccccctctggcggcgttcacgtctgtgcgcgcgcttgagcgctagaagattgaggtggctaccgtaaatgcctgaaaaacagtcaccagctgggactctaccactgcctcgagaggggctatggacggtcgtatggaccttggactttggagatgggggattatgccacattcatctatgtttaaatcttggcaggctgataatttcaggcggcactgtcctagccagctaaaactcttctccaccctattgccctcgctgcgccctttcttctgtgcctccggaagttactctttcagtaggcgtttgggggcggcactggtcaattttgttctcggttgcttggttgggctagatttcggttctgccgggtgggcgttttaagggctgtgggcgtcacattcgtcggtgtgtggccaaggggacatgacacgttttaggaaaagtaaacgtgctactaagttgcacgacttgtcaagaaaagaggcgcttccgagtttgagaattgggagcaaatggagtccgagtggacagaaagacaagaccctgaccgtggggaatttaaaggccggccagcgtgcttccgaaggccgggggtggaggcattacctcctctccgtgccctcttctcttaacctgccctgggccaagggcctcggccccgcgaaactgcgagtcctccagaaagacacatcgctgttggggtgtccaacctttctgggattcgtagtttatacccaggtcctggttatattttagttaagagttctaataagcagctgtttaatgagcacttgtgccagcccatatactacgggttttgtgtattattttaaaaagccttttaacgagcttttaacattttttaagtgagtacacttagacgaacataagtgtcagaattgacaaatccaggcctacaggactccagatcgagcacttgtactttactgccccaataaaaagctgttaacattttagcttatttttttgagagagggtctcgctttgtcgcccaggctggagtgcagtggcgcaatcacaactcactgtagcctctgcctcccgagcccaaccgatcttcccacctcagcctccctagtagggaccacagatgcacaccaccacacctggctaattttatttttatagagatggggtcttgctatgttgcccagcctggtcttgcagacttggcctcccaaagtgctgggattataggtgtgagctactgtgcctaaccacattttagctttttattacaaaaattttcggccgggcgcagtgactcacacttgggaggatgaggcgggtggatcacgaggtcaggagttcaagaccagcctggccaaaatggtgaaaccccatctctactaaaaatacaaaaattagcctggcgtggtggcgggcgcctgtaatcccagctacttgggaggctgaggcagagaattgctttgaacccgggaggtggagattgcagtgagccaagatcgcgccactgcactccagcttgggcaacagaacgagactcccatctcaaaaaaaaaaaaaaaaaatgcaaacattacaccaaaatagaacagtattaataaactctaatatactggtcacccaaattttgtttgttttttaactaaatcgcaagcctcagccctcggcaaattttttgtggcagtccatgggatataaatttatcaagctaggtgtggtggctcatgcctgtaatcccaacactttaggaggctaaggtgggccgactgcttgagctcaggagtttaataccagcctggggcaacatggtgaaactccgtgtctacaaaaaattagctaggcgtgatggcgtgcacctatacctcctactcgggaatcatctgagccggggaagtcaaagtcatgcctgggcgacagagtgagaccctgtcttaaaaataaataagtaaataaataatctatcgaggaagatccatctctcacagcattaactgctccagtcacttggtgctatccaaggacaacctatttggcaattcttactgcctattatttgagaacttattacccaccagaaactaagtgctttgcaaacattactattaattatagcaaatatatactttggacttaccatgtgcaagtctttgctaagggctttatgtgcattatttcatttaatcctataagattgatgatttgccaattttacagatgaaaaaacagacatagcagttaggggttggtggtgttttgtttgtttggagacagagtctctgtcgcccaagctggagtgcagtggcacaatcagggctcattgcagcctcgacatcccaggctcaagcaatcctccctcctcagcctccctagtagctgggactacaggcgtgtgccaccacatcggctaatttttgtactttttgtagagacagagttttgccatgtagcccaggctggttttgaactcctgggctcaagccatccgcccaccttggcctctcaaagtgctgagattacaggcatgagctacctgccctgcctgtagttagggtttggacacattctgcctgacaccaacatctatcctctctaacagccagattacatagcctctttgtagtaataaatgttgagtgaatgtgtcagtgaacactgccagggtatacatatttttctaattgtaaactaaagagagcaatccaccgtgccccagcacctgcatcatacctgttctaaagcatttaccaagttgtattgcaatggtttgtctacacagctagttttccctctaacgacttcttcaagatcaggggctatgtcttattcgtttttttatgtccccggggattagctagttcttgggaaacaactgggacttgggattcaaaacagtttgctaagtgaatgaatgagaggcccagtcaagctacttcccttcagtgctgcacagtgcaacaaataaccagctcagatacaggttcaaagaccacaggcttctccctggacagctcagctctcctcataactcctgagaaaccctggacatgccagggtgtactatggagtggttgcatccggaagagggggaggaagtcccaaacactaagtaatccaggtttgggttggaaaacaaggttgaagttactcattagcaggtgaaagggtcaagggtcgaacgcaagggagctgaaagcagagtggactgagcagccagtaggggagagagcagttaaggcacacagagcaccagctccctcctgcctgaagatgttccaccaaatttgggcagctctgctctacttctatggtattatccttaactccatctaccagtgccctgagcacagtcaactgacaactctgggcgtggatgggaaggaggtatggactgagattaggggaagcctatggtggaggctctgagggacttgggtggatggcctaggatgactggagaccatcttgggaaaggaagagaggaagggggtgtgagtgttgtgataatgaaagcaagaagaaaaatatcagtactgtggccatcaatgcagaggcatggcagaattggggggtggggtggttacccaggttgactggggaggggcaaagaggaaaagtcatttaatgactctttgtcatggatccaatccccagttggaaagaggaaggcagccaacacctctacccctaaatcttgctgttttgactgatgaagaggttgaacccatcctgtgctggaacccaccctcttttgctcccttcattgtctctccagttcccagaggtccacttgggccagtggtactttatcgcaggggcagctcccaccaaggaggagttggcaacttttgaccctgtggacaacattgtcttcaatatggctgctggctctgccccgatgcagctccaccttcgtgctaccatccgcatgtgagtggtaaggaggcagaagcatcactgggttcagtctctgcccaaagtgtgagaatccacccaccaagagctggcctcttagctggtatatctactatgcttggcccacggaattcagtggctgtattaattgccctctggagaaagatgtgcctaaccaatgcttggtagcttgaaacccaaggagagctgggcttcaataacaaatacaatggagtaaatagaagccgggacaggccagacgtggtggctcacgcctgtaatcccagcactttgggaggctgaggcggacagatcacgaggtcaggagatcgagaccatcctggctaacacagtgaaaccccgtctctactaaaaatataaaaaactagctgggcatggtggtgggcacctgtagtcccagctactcacgaggttgaggcaggagaatggcgtgaacccgggaggcagagcttgcagtgagccgagatggcgccactgcactccagcctgggcaacagagtgagactctgtctcaaaaaaaaaaaaaagaagctgggacactatggttggggtgatgctcattctttcctccttgccaccaccacctctgcaggaaagatgggctctgtgtgccccggaaatggatctaccacctgactgaagggagcacagatctcagaactgaaggttggttcttcccagccctcaccctcccttgagtttggttctgcatctctgttctcatacttctcccacctgccttgacaggccgccctgacatgaagactgagctcttttccagctcatgcccaggtggaatcatgctgaatgagacaggccagggttaccagcgctttctcctctacagtgagtagggatacaaggcaggaagggttggagggaaacaagggagggcaggagaactcctcactctgggtcctatgacaccctcccaggaagagctaggtgcttccaggggttttgactggcctgaccccaccttgcccttccagatcgctcaccacatcctcccgaaaagtgtgtggaggaattcaagtccctgacttcctgcctggactccaaagccttcttattgactcctaggaatcaaggtaaggtgttaaaatctcataaaacaggattaggactcacaaagtcttctggtgttacagggtgaaagaggctcgtgtgatgtcaccagagggatgtggctaagagctgtgatgtcacctgagggaggcaggatgggttctgggctactcaaaagagaggtttctgagtttgcactggataaagggggcagagggtcatacgtggagggaaaagagccttagagactcccctttgacacagggaatgaaagaacacgttctcccccaccccattactatcaactttgcttttctccctggacttcccttctgtccttctttttccctccccccatcacagaggcctgtgagctgtccaataactgacctgtaacttcatctaagtccccagatgggtacaatgggagctgagttgttggagggagaagctggagacttccagctccagctcccactcaagataataaagataatttttcaatcctcatctcattctggggtttgtctccagacgtcattcccactcctcccatttcaacattccccctggatcctctaccacctaaactcccagctggacggtgtcagtaagaacagagtggcagtaactctcactttgtagtggtatatttaggatttgatgtgacacagttatttattgctgagtgagcaaacccctagcccccaagtggggactacaggcttcagtgcttcccccacactgcctgagctaccagcccttctgcactggccctcctgccaatactgcctgcactgtccccactccctctggctcccatgatcaccagatccgccctgcaggctccctgtcacctgtggggccctatccagaccccctaatccacttgcctagcagccccactcttccctcgatggctcagatcctgagatccaaggaacaccctgggtttcccaaccactctcttactgcagaggtctgtctatcctgccctggtctcctccaccccaggagagttttcaaaggtagagaggaccctttggtctttattcaccaccatcatacttttttttttttttgcttttaaaaagtggaggtggaaaaaaaaaaaaaaactgaaggtgggagaaaagtaaaagcaaaaataacagctggtgaatccaagagcagtgccctcactgtccataaacacaaacaccctaaatagttctgttctctcctgtgtatgaaggggggccctgcaccctcgtactcgggtttcttccccatccctgaggtccctatgcttacaatttgggtcatgcctcacacttttctcctaaagcccacactctcttcaccctttgcccccaccccacggtcacagcccctttcccgggtctcccctctgctcctcaccttccctctccaacccctcactctcccagtcagtggccgcctcatccccattgggctcccggaggctgacagccagcaccaaggcctgcaggagaccaaagaggcaggcgaagtgcaaagggtgggcagtaagtaggctcagaacagcatggagcccatgcagggcagccaggaaggacagtaggccatgtagccagaggcccagcggtccacgcaggcccagtgtgtccaaggctgcccgcagtggtcgtgagcacagggccagcagggcagaggccagcagctccagaagatgcagggtcaggttggtggagatctgcagacactcttctgggccccccaagtaccgggagggagctcctggttccccccgcagccagcccaacagcttctcacgcctaccaggtttctccaatggggctcctggcccagggacgctcagtcccccttcaggggacacccctggtctcctggtgccacctgaatccacatgatcccatctgagtttgggactggcccctccagcctccagtctcccagactcttgagtgctagagataggctggtcccacttgagggaatccattcttttgctccctagctgctcaacttggggctcctccttgcttggttcggaagcagccctagaaaccctcaatgcccccgagtccttagtcttgggatgccccacatcttccatggtttctggggcactatcccagtcacttcctgaattctccgaggagctgtccacccgtctgggttctgggtaaggcgggtcaggcctcattggtttccggcggccccaagggcgaggtagccagccaccaagccgtcgcaggaacatggctggggtgtgtaatgggcccccaaattctgaggctgcttcctggcactactcagactctcaggatctcctcagaagccagagtctttctggctcagaacaggtatttgcctggtgatgcagtcctactctgaattcagaagtggctcctcccttctctgaatagtcatgcagcctcaagtgtggcaagtagtttgcttcctcttcagttctggggtaaaggggggcatacccaaattcattcaccatccacacccccacaatctgagattccaagaatctcagatctgacaaggcctgggtcaccaccagagagtcctctctgcgtttccggatttccttcccagcaggcagcaccccaagtttcactcaccaaggccacaccccacggtgtcccagaaactggggaggcagtgctccatccaataaagcgggcaggaaggtggccccaggtcctaggtgctcctggatcgtgtagtctttaactgctgccccaagggacctcaaggaataggaattctctttgttaggaggtggaatgaaagtgtccagcaaactccagccagcagcgttcgtcccttgatttagagggctatgatttctacaaagtggcccgactggcccgcgaacacgcagcagagacgcggcctccacaaggtcagaactaagatgtcctcagagatccccagttacgaagcaaagcgcgggcctacttcgggacctacgcgtccgggcgctgtgcgcggggaccgctcccgggcccagcgtcggggccgcggccttggggagccgccgggagccgcgaagcccggaagcagctgcaccaggactggaaggacccgcgggggcggtgccgcagctcatggggcggaccctgcgaatagaccgcccccgtataccccgcgctgtctgtgcgcgccggaccgccaaaccgagattagcaaggaccaggaccttaatataaacccagctccccattttcccgggtttctcatgcttccctaaactcggtcgccccctacagccccctgcccctgggttcttttccacatcccccaccactcctccatttcgcatccaagacttcatgaaaggctttcccagaaaagaaaaaatgaggagtcttgcgacttgaacagccctcccctgcccgtctgcaaatttgaattcctggatttcacaacagtgagctcttcttgtgcctaccacccggcatgagcaagacaagggggtgggtggtgggagagtggggaagtgtgggaaagaaaagtgtagacaaatgggtggaacaaagaagtttgacttaaagtttagatttgggggctagagttctggtcccagttcaactaagtgtacaagcttgataatcgtgggccctcctatcacactggcctcttccagcaaaaccctacccattctcatctctagaggccttgacttcccttatcaccctgcattataatatttgataacatgggccgggagtggtggttcatgcctgcaaccccagcactttgggaagccgaggccggcggatcacctgaggtcgggagttcaagaccagcttggccaacatggagaaaccccgtctctactaaaaatacaaaattagctgggcgtggtggggcatgcctgtaatcccagctactggggaggctgaggcaggagaatcccttgaactcggggggcagaggttgtggtgagccgagatcatgccattgcactccagcctgggcaatgagagcgaaactgcatctcaaaaaaaaaagaaaaaaattgataacatggcactttccctctccagctgtgaactctttgagggttgggaatgtctttacctgtattcttggcacatagtatatggacttatgtttgtgaaatcagtgaattggctgtagtcagggaactcctcctgggggaagtgagacttgcacgaagctgggcaattcttggtccaggggggttgaaagaataggtgggggactcccaggagggtctgggacctgaaagtgaacccagattggcagggaggtgaccttatcatgccacctggagaggctgccccttctgactcaggtgggacttgcatgtggctcccaggcttctgtttggcttcctcaaaatagcttccagaaaagtgaataaaccacaaatggttgatttatttctgactctcagcccgtctctcacgaagacagagcctattgaccaaaaacttcaggatctgcatctgggcagatcccaggaaggggaagtcaaagggcccaggtcagaggcccaagttcagacttcagcagcagactagggtcagactttaccaaagtcagaactcgaggttcatgtaagtccttagatcccgctcccaagccctgtctttctcctccctccttctctcctccctccagctcagtgtggccacccgagggggtctctccctcccagccacagctcgggtatcccaagctgggaaatgtgtcactcggggctggggtgctgatctgtagcctagtccttcctggtctctcttgaggacagtggggatgggattggcacggccctcaccccggggtcccagccccattcctggctcccagccccccctcagcagcagtttgaagcccgggctggagatgggcaccccaagtggaaggttgggaggctgaggaccctgcgacagtgacagcaggtgagcagtggatgtgcggtggttggaatcttggaagtgggtgtcacagttctcgcagtactggagggagggagtaggagacctgcagagaaagaagaaaaagcattaagggcaggggaaggaaaaggggaagagttgaggcctcagagggggctggcagggtagaataggatcttttcagcttttctgctaaggaacaaattgccagctaggcatagtggctcacgcctgtaatcccaacactttgggaggcagaggcgggcagatggctttgagctcaggagtttgagaccagcctgggcaaaatggcaacgcctgcttttttttttttttttttttgagatggagtcttgctctgctgcccaggttggagtgcagtgccatgatcctggctcactgcaacttccaccttagcgattctcctgcatcagcctcccaagtagccgggattacaggcacatgccaccatgtcccggcaaagcctgctttctacaaaaaatatgcttgagcccaggaagcggaggttgcagtgagctgaaatcacaccattgcacaccagcctgggcgacagagtgagatgagtgagactttgtctcaaaaaaaaaaaaaaaaaaaaaaaaagggacaaattgccttccttcctacttaacagtgagggatccaggctggtccaaaggtggtggtgagttatctgaattaattgttcactcagttacagatcaaactccttactccacttttcccctccttctcactactgcacttgacttgtcttaaaaacaaatttctttaaaccattgtgggatccagagcagaatagttgaaagaaaaaaatggtaaccagacctagcaaactcttgggcaaggggagggacattagtcataatgactatagctaacattcatgtattgcatactatgcggcatgcactattctagcattttacatatattaacccattgaatcctaacaacgattcttactacccccatttctaagatgagaaaactggaacatgtagacattaggttgtttgcccaagtaagtggaatcaggctttaaatccagggagctcatgtttataaccacttgactatactaccctgtcaacctacacatgaggataaggaaagaactcttcagcactgtgctggggcgtctggtgtggtgtggctgggagaggcagaacacaatgagacatgggtctgagctaaagtttccccttaccggttttccgggctccttgtctctccatggctctccctgaccatgcgggctacctcagggaagccagcttcttcagcgagctgagccgcatccctgccactcagctcacagacccccacccaggcagccccacggcccaggagatagctcacagctgccccctggcccgctcgagcagcacacatcagtggggtccaccagaaggcatcccgggcgttgatattccccccagctcctcctgcctcatgcggttccagcagtctcctaagttctggcaggtccccctcctgggctgccctcagtatccggtgagtcatcttatcctcagcctcaagggatctcccttgtccatgtcttcctgatgctccttctgccactgcttctgctgctggtgccttcattattcttcttttctttctctttctttctctggcaggttcagtctgagatctctgggagtcaggagcgctgctctcatccccaatcagggcctcatagaaagctcgggctgcagccccatccagggtggactctggcttctcgggctgtggctgctgctgcccatccttccagaggtcgctggggtcagtggctggggtgaaggtgatgagcaagggccgggacatggcttttgggagaactgagaaaatgataccaggcaagggaaggatgagacaagtaagccaagctcgtggtgaccctgtagcaaccacagcctcagagacctgctgggatgagaaaaagtagtcaaaaacactttcctgccactaaagtaaccccacaacttaggactctgcagggcctaagggagagagactttgcgtaaaaacatggaaccctacaataccgactttgctccttagtaaagattaataaaactccatgagactgttgtccagaggtcctgcgtccggcccccacccccatcctcaccaacaataaacaccagcctctttctgaaaccactttcccaccccgtaagacataccagtaggaaaaaaaaatcagcctggccctttaagtcttccgcgatcccatttcggagtttcctcttcccaaacaaaaatagatgggtcactccctagaagatctcggggagagtctcctatacgtgttgctgtgtagcttccgtaccgcaaaatggcgccattctaatcagaagagttgacacaatcaaatagccacacggcacgaagacgcatgcgtggcgacaacaacaacaaaaaccacaacccacattacttgagggctcgggcgtgcgcaaagctccgggttcagtttcccgcgctggaactttttcaatagtaaacgagcaaagctccgcgcgcccaggtggcgcgagcactaggatctgtcggttggggtcctacttttacataacgcccccacaatgcccttcgccttcctcaacgtggcccccgctccaagcccattttctggagccaggaatccactctgtgggttaggaaaggccctcaggaggcggagggaaacctgtggaatgccgagaagccgtgtaatgaaataacgtcacgcctgcccctcaccattactctgaccagggttcgaaggtcacacttagagcctaaggggaaatggagaagtgcaaagggacgagcagaatggctggcaccacctcaggttagcgcactgggacgttccagttctcacaccgcccaccccaccccacccaagtccctacgcacggagccaagccgcacctctcccctcatgaggcaggagcccggaggaaacagtatgcccgtcaagggtctctggcgggactgattcgcactaggggcccaacaggcaataaggacccagcggattggccgaggataggccagtcccctgggcagcagcgccgcgccgggactagaggggaacgtgaggagagctgcggaaagagatccagcctggcttcctcctttccccgccctaagtcagcctcttcacccagtgagcacaaaactgtattgcccagactcccgggccccgaacgccatacctggcttccgcttccggtggcttctcgttgtgccccgcccgcaagcgccctcctccgggccttcgtgacagccaggtcgtgcgcgggtcatcctgggattggtagttcgctttctctcatttagccagtttctttctctaccggggactccgtgtcccggcatccaccgcggcacctgacccttggcgcttgcgtgttgccctcttccccaccctccctaatttccactccccccaccccacttcgcctgccgcggtcgggtccgcggcctgcgctgtagcggtcgccgccgttccctggaagtagcaacttccctaccccaccccagtcctggtccccgtccagccggtgagtctgaagtcgtcgctgctccgagtcccttgtcgctgggagcggcacatggggtctccggactttgatgtgggggcgggggaggaagcgaccaggtccggcacgaaggagggagaggtggcctgaggagcggaggggggatgtgtggattccggtgaaagggacctgacaatcgcccccaacccgtgagaaaaggaggagcccggttcttgcttgagaatgataaacttggaaacccttgggaaaggcgtgggggtcatgcagagacttgtattggtagggagcctgagtcgaggtccctgccggagttgacacagaggagagagggccctggccttcgggagctccagggatgtgggtcgggctggtgggtcaaagtatctgttggcttctttcaagtggtgggaccccaaagaatgtttaacttcaaagaaaaggggctgagatgtaaattagaggagctggagaggagtgcttcagagtttgggttgctttaagaaagggtggttccgaattctcccgtggttggagggccgaatgtgggaggagggaggataccagaggcagggaaggagaacttgagctttactgacactgttctttttctagctgacgtgaagatgagcagctcagaggaggtgtcctggatttcctggttctgtgggctccgtggcaatgaattcttctgtgaagtgagttctcttcaacctccctacttgccagcttcacatatcttcccaccagacgttccttcacatattccacttctacactgttctcttacatgctatttgaaaacttcctatcagcaaagagtcccccctataaaccccgacgaacctgtgctaaagtggcaaaactggggcccaagtcctgagtctgccaccgtccagcaatataacgttgggctagtcaatttgtgtctttttcttttttttgagactgggtctcactctgtcaccgaggctggagggtagtggtgcgatctcggcttactgccacctctgcctcccaggttcaagcgattctcctgctccagcctcccaagtagctgggattacaagtgcctgccaccatgcctggctaatttttgtatttttagtagagacagggtttcactatgttggccaggctggtctcgaactccagacctcaggtgatctgcctgcctcggcctcccaaagtgctgggattacaggcgtgagccattgcgcccggcctgtatcttttgttactaaagtggcactgctagtacttgtctcaggtggcctttaggaaaactgaaatgctacacattgaaatgttttgttcagaaaccatgctgttcagcttccaccttccttagccagctgagaggacaaaactggttcctagagacgggatacaggagtggagtagggacaaagatcttgaaaagaatgtctaagaaaaagattgctgtatctacttatccttagaaaagaaaagccaaagcttttatgggagagagtgtaggtgaactagggagagacacaagtacttctgctgagttgggagtgagaaacaagcacaacagatgcagttgtgttgatgataaggcatcacttagagcattttgcccaggtcaaagatgaggattttgatatgggttccctcttggcttccatgtcctgacaggtggatgaagactacatccaggacaaatttaatcttactggactcaatgagcaggtccctcactaccgacaagctctagacatgatcttggacctggagcctggtgaggcaccctcagggttgttttgtgtgtgtgcgtgcactatttttctcttcaaatctctattcacttgcctgaattttgaaatttcctttggttctctgatttctttaaccccaaattcatgctttattttgatcctccacctgactcttgtctagttttgtgacgtatatcacttgttctcatgttttctaaatccgcaattcagacctcatgcgtttcctcatgggtctggtttgttgtctgtttctcctgctttgcaccttccagtctagagtttcatcttctgcattgacattgttgcagttatgtattgaggagggagttgggagggagagcaaggagcagaggctgaaaaggtgtgaagggaaggcagagctgtcttcgtttgatgcaagggtcagaagcccaggtttctgggtcccatgcccagatgttggatggggtaaggcccaaaagtaggtgctaggcaaactgaatagcccgcagcccctggatatgggcagggcacctaggaaagctgaaaaacaagtagttgcatttggccgggctgtgtttcagatgaagaactggaagacaaccccaaccagagtgacctgattgagcaggcagccgagatgctttatggattgatccacgcccgctacatccttaccaaccgtggcatcgcccagatggtgaggcctctctgctcctacctgcctccttctgagcagtaagagacacaggttcctgcagcaagaagtcatgtttaagccctgtttaaggaagctagctgagaagaggggaagaaccccagaacttgggcctgggaattgaattctgattgggggtcatcctgaagggattgttttcagggagggagacagaccttgaatcagagagttgtgatagactgcctcttcctcaaggaacaaacaacaaatggctctgatggtttgtagcctgcctaattggaagaaaggcaacacagaagtttgagagcccatctagtccagagaaggggcctctggacagaggtgggaggagtgggggacagagtggtatgggttgggctgcgaagggagttgcctcttctttacatctacctgccaaccccttccattgtattcacctcagttggaaaagtaccagcaaggagactttggttactgtcctcgtgtgtactgtgagaaccagccaatgcttcccattggtgagtgttgaagaagggaaaggaaagcaccgtgtggcagtcttatgggaaggagttggggctcaacacattggagcctgagtcctgaggggaggttaggtaggaatagggggatacctggcctgctgagtctggctgtctcccaggcctttcagacatcccaggtgaagccatggtgaagctctactgccccaagtgcatggatgtgtacacacccaagtcatcaagacaccatcacacggatggcgcctacttcggcactggtttccctcacatgctcttcatggtgcatcccgagtaccggcccaagagacctgccaaccagtttgtgcccaggtagggagcagggagagtcattaagggtcaaaggaaaggcccaagatcccccagagaggggaggacagggcatggccctttcttgaggtctgcttctcccagaatcagggcatctccctgctgagtgactgtgggaaagttatttgattatctgtgcttgagttaccttattgtagaatgttcttgagctgagaagttgggaaccacgaggctttagctctgagcaggtccatagaggagctcaggtggggaggtgggaatgcaggtgactggcagggcctggatggggctcatgctgctgcctctctgacctctgccctggcctaggctctacggtttcaagatccatccgatggcctaccagctgcagctccaagccgccagcaacttcaagagcccagtcaagacgattcgctgattccctcccccacctgtcctgcagtctttgacttttcctttcttttttgccaccctttcaggaaccctgtatggtttttagtttaaattaaaggagtcgttattgtggtgggaatatgaaataaagtagaagaaaaggccatgagctagtctgctggtgcttgctgttggggaagggaaggtgatggtgtgttggactccaggggccctcatggcccagcccaccctccccagattgaaaaccaggacagatttgtgctcagtggattgggtggtgtttttagtatggagcagaacagaattcctaggactgcgtgtgatgaaatgcaaggtcaaaaggaaaagacaaagcatatttcaaagatgagaaatatttgtttggatatctatgactgtctgtttatactgtaaggggcttaatcagcagctccatcttttagttttagttctaaaggaaaagtagcctaaagtcagtctaactaaagggtggaacgaggtgggacaaggtccggaattgctgctcagtgatgtgtgtgtgcctgccgctggtggagctgagactgctcatctcagaaggatggggatgcttgatttcctggccaggttgtcccagcacagtggggattggccctgttgtatgacgaagacagcacatggtggcagagatagatactaacccatggactttccaagggagggaataggtctttggagggtatgcaagacaaaggtagacactggataaagaacccggtagtgcccaggtattaccccatctgggccattactcccacactcaggaaccagacgttgtgggtgaggacatgctgtccctcctgccaagtaataacttccttcccagccaggatcctgccccaagtaggaatatagctctgcatttacagcagctcctgctcagaccttgtcaaaaccaccctgcagcttaggattaaggagcatggtcacaggaaggtggggtttcagggcatcccctcaggaactgcccatctccccagaattccaaaatgaaggtccatatgcttgtaggtgtgctggtcatggtgggcttcacagtaggaaagggtaagtggggcccaggggcagggagggaggaaggggtaactgagtccaggaagggggtggagcgtggccatggataatcgggcttcctactggcccagggtatttgagagtgacccagtgcctccatccctccttctgcctccccagttcctgttcccgacatccggacgtgccacttctgcctcgtagaagacccttctgtaggatgcatttcaggctcagagaagtgtaccatcagcagctcatccctgtgcatggtgatcaccatctattatggtaaataaggtcccaggaaggggctgctggtggggcagccaatggcttggtcttctctcctctcacagatcagggctgctccgggcatggggtacaagaagagaggaggggctgagtgcaatggctcatgcctgtaaccctagcactttgggaggctgaggcaggtggatcacttaagctctagagttcaagaccagcctaggcaacatagtgagaccctgtctctacaaaaaaatagccaggcatggtggtatgcacctgtagtcccagctactcgggaggctgaggtgggagatctcttaaactcaggaggcataggttgcagtgagccaagattgcgccaccatgctccagcctgggtaacagagctagaccctgtctcaaaaaaaaccagaagaatcttggaaggaggggtctaaggttctagggggccagcagagctcacttttctagcctcttgaaggactctgggttagaagtaaattaggtctgggtgaaggatgggaaaagtcagtagcaggggttcttggactatgggaagctattggaaggggttatcagctttcccctctccctcagatgtcaaggttcgcttcatcgttcgaggctgtggacagtacatttcctaccgctgccaagaaaaacgcaacacctactttgcagagtactggtatcaggcccagtgctgtcagtacaattattgcaactcctggtcaagcccccaactccagagctctctgccggagccccatgacaggcccctggccctgcctctgtctgactcccagattcagtggttctaccaggccctgaacctctccctgcccctccccaatttccatgctgggacggagcctgatggcctggaccccatggtcacactgtccctgaacctgggcttgtcttttgctgagctgcgccgcatgtacttgttcctcaatagttcaggacttttggttcttccccaggctggactcttgacacctcacccttcctgaattccacagtgcaaatatctttctgtaacaccctcagcatcctgcactgccctctctgaaaacacccacattctttggtcactgtgatttcttaggcctccgtctgttgtaccactagcatctatatgacttttgtgtaattttctctcttgaactctggtgctgtttttttgtttgtttgagacaaagtcttgctctgtcacccagggtggagtgcagtggcatgatctctgctcactacaacctccacctcccgggttccagcgattctcctgcctcagcctcccgagtagctgggactacaggcgtgcaccaccacgcctggctaattttttgtatttttagtagagacggggtttcaccatgttggtcaggctggtctcgaactcctgacctcgtaatctgccctcctcgacctcccaaagtgccgggattacaggtgtgagccactgtgcctggctgagctctggtgctgttcttccccctagaaaagaatctctagtgtggattctgcccagacaggctgacctgagaaaggcacagtggttcctccattccttccccatcatctgagtgttccagtatcccccatccctctcaatccagtcacctgcctattgacatctagctctgtttcccctgtcttgtccatgtctctaagacccagtaccagactgaactagcagcaagaaggacgaggaggccgggcatggtggctcacgccggtaatcccagcactttgggaggccgaggtgggcggatcacttgagattgggagtttgagaccagcctggccaacatggtaaaacccgctctctattaaaaatagaaaaatcagctgggtgtggtggcacacctctgtaatcccagctactcaggaggctgagacaggagaatcacttgaacccgggaggcagaggttgcagtgagccgagatcgcgccactgcactccagcctgggtgacacagtgagactccgtctccaaaaaaaaggatgaggaatagaattctgtgcagatgtcctgacttggcaattttgtgtccctgcctcactgtctccaccaacccccgcctgtcctagtgttgttctgcctcctgtcctctcttgctctcttgtcagtctctggcttcctcggccccatttcacttcactgagtcctgacacccatctccctaggggcctgtgagaggagagggaagggtctgttctgctcagctccatgtcccccattttcctccacaataaactgggactgggctaaaactgtgtcacattgtttgtggggtcaggctcaggtgtgggcaggtaaacacagattaaagaggtttaatgcctggcgcagtggctcacgcctgtaatcccagcactttgggaggctgaggcaggcggatcacctgagattgggagtttgagaccagcctgaccaatatggagaaaccccatcgctactaaaaatacaaaattagccgggcttggtagcgcatacctgtaattacagctactcgggaggctgaggccggagaatcacttgaacctggaaggtggaggtggcgatgagccgagattgcaccattgcactccagcctgggcaacaagagtgaaactgtgtctcaaaaaaaaaaaaaaaaaaaaaagggttagtgaggtttgggatccaaataggattgcagagccctctccattgcacttggcgtttgtcgcttcctctcggcctcctgtaaagggcacacatccctccccaccctctgcttagctggagatcaaagcatggggactgtgattcttcccagccttaaacataccctacaaaacctggaaagttagaccctgatgatgccaggtcttttcacctaagaaaagaaactttaggccaggtgcggtggctcatgcttgtaatccctgaactttgggaggccgaggtgggtggatcacctgaggtcgggtttgagaccagcctgaccaacatggtgaaatcttgtctctactaaatatgaaaaattagctgggcatggtggctcatgcttgtaatcccagctacttgggaggctgaggcaggagaattgcttgaaccggggaggtgtaggttgcagtgagctgagatcacgccattgcactccagacagggcaacaagagcgaaactctgtcttaaaaaaaaaaaaaaaagcctgggcgcggtggcttgcctgtaatcccagcactttgggaggccgaagcaggcggatcatgaggtcaggagttcgacaccagcctgaccaacatggtgaaagcccatctctactaaaaaaaaaaaaaaaaaaattagttgggcatggtggcacgtgtctgtgatcccagctactcaggaggctgaggcaggagaatcgcttgaacctgggaggcagagtttgcagtgagccgagatcgtgccactgtactccagcctgggtgacagaccgagactgtctccaaaaaaaaaaaaaagaaactttctctttaaaccagaaagactcaggaactcagagccacatgccagagttacctgctgctggggccctggactcctgccattccttagttcttttcaaggattctggcatccaggatgccctctcgaggggcccaatttgaggggcaaagtgctgagagcactgatgttgggctgcagtggttggatcttcatgctaatattttaattttgaaatagtgcaaacgtatagaaagcaaggatggatacaacagccttttccatacactggataaacatgctggacataacgctgctctgagtcaggcttggtattgagcagcaggactcccagatgagtatagccaggtgtctgcccttccaagtcttgcagcccagtgcttgggttatgaaacctttttctgaaaagcagtgcagctttgtggctgggaggtccaatcccagcccctctaccacttggatatgtcagtctcttcagccccaccttggtcacctgtcaagtagggatagtgcctcagatgattgagaaaacacatgtaaatgtgcatacacaagtagaagttaaggccttttccccctcaaaaaaatatatttgccctagagtcaaatgcatacacaatgttcagcttttttttctaaggttcttactatgttgcccaagctggccttgaactcctgggctcaagagattcttctgcctcagcctccaagtagctgggactacagttgcacaccaccatgctcacctggctgatttacttattttcaaacctttttggtaaaacattcagaagcttgcacatatcacaagatggatttttgtaaaccacacatctgtgtaaccagccaccaaatcagcgtgaagacctttacccgcagccaagcctgcctctgttcccctctcccaggtgctcttcccagctctggggtagccgctgtcctgactggtagtagcttagatgagttctgtctgtgcttgatggaaatggcatcgtacgcatctgcttttacctatatagtgttttgcacacgtgttaacaaatctgtgtggcctgtactctgacggaaaataccaaaccaatgataattaagtcatgaggcagttggcgtacaaagagaggtacaaacccttaatgtgccccccaacccccaccttgctaagtccacccttctccatgacctctgacgtcagtataagacagagaaaggcccaggtttatagcaggtcaacctggaagacaccctcagaggctgaagaacttggcccagaattgaagagaccaggactccaataaggtctaacatctctttgagagtggccttctcggctcggggtgactcacgcctgtaatcccagccctttgggaggccaacgcaggcagatcacttgaagtcaggagttcgagaccagcctggccaactggtgaaaccccgtctctactaataaaatataaaaattagccaggtgtggtggcatgtgcttgtaatcccagctactcgggaggctgaggcagaagaatcacttgaacctgggaggcagaagttgcaatgagccaagatcacacgactgcactccagcctaggtgacagtgagactgtctcaaaaaaagagtggccttctcacccacctccttctacctgggcctggtcctttcgcagcccccttcccaccaacatagccctctaaacgcccctagcccccacacagctctggtctgacagcactgccgaggatgcccactaactttctggcattcgccataggagggctttcatttcctctttctctttttgtgtctagagcaaatcacataccaaggcaggacaagaggacagctcagcagagctgggggtcccttacctgacccatggtagggcagttaggcaggtgcacctccctcagccttcacctccaccagaagaaagagacataccaaacagtttacacacaaatttatttgggagaaacatccagggactaggggacaagagaggaaacctggtgggcagtagggctgggggtacagagtagcagtaagtgtgctgaagggcgtcaaccaagaggaagagccaaggctggggtccagtggctggagggaggcaaggagggctggtatgagggactagaagtcctggccaagcccagatagaagtcaggaaggtggctggaaactggtggaattttacaccaaagtttgctgcagtcacactaaggagtatagagccctctgttttgagggtcattgcagaaatccaggaagcagtattgagagaatatccagaagccagacaccggagaagttcgggtatttgaacaatcactcatctgctccttacttcggcagtcactcaccatgacgtcagaaccgctgcctggggagggacagtgggcaccagtgatacggaagtccccaggaagagccccaaatcctctcatccccacactcataagtcaaaaaaaaaagaaaaagaaaagattcctgtagttaggcatgggtggacatgcccagtgttcaccagccatggaactccactgaagttcccatgcaaggctggaggaaaagagccatatgaaatgtaatggttggagggggagttgggagttactgagccaagtgaggagaactagcaccataggaccatgtgagaaaaagctgggaaatgttttggagattgggtggcaggaaggaggtgtattgttatttatttttcagaccaaaagagaataagatgatgtctgctgctgttatacataatagagaaaaatctttgtgcctgcatcccaagaagtcatgttcagggatgtttgctgctgccctgcttgagagaaatgaccaaaatgcccatcaatagtgggatggggaaatcagctgtgatatgcgcatgctatggagtagtatacagcaggtcaataaaacaaggaagctgtttacaaactgatatcggaacattcagttcccctaacttaaatgtggaataatgtttacagtgggatgctactatcttgggttggggcgggggaagaggtgaaaaaatagtaaacagcatatttgtgcagggtggaatgtgcataaaagattgcaggagggatcatccagaaagtaaaaaaagtggtcacatgtgcaggggagccaggtgggttagggtagtagcgggagactttggtttgatggtattgtatactctgatatttgacccacatctgtgcatcggctatgttaaaagggtagtaagaggacttgaacacaggcagctgcatgcagtggttgttgagagcaccatctctggagccatcacaaattctggctcagcatctgtgagactcaggcaaggttatgacctttctgcacctgtttcctcatctgtaaaatgcacatagtaataatacctgcctcagcggattgcaagtgtttagaacagtgcctagcacatattatgtgttacgtttttgctaacttaagaaaggtggggggtcggtggaagagcaggcatcgggaaggagtcaattttcagcgagggagatgtccagtggtcaacgggatatgaggagagcggtttgacataacattcagattcagaaggaagtggtatgtggctgctggttgaagccagcaaagcagataaaatcctctgcttttgagtatatgaagtgggaagacagctaaggaccaaaccttggtgaacatgaaccactaagggtcagagagaaaacgctccatgaaggagactgaagaagccgtggaggatgcaggagaagagcaacaccagcagtaactgcagacagatgcggaagcagacagcttgaggacaggcaagggcacctggagatctggagggtccccgtcaaagctgcgcaccttgatagggtagaagctattcagctacagattgaggagagaaggttagtggaagtggagacagagtgtggctctgaagaaaagggaagagaggctgggcacggtgctcacgcctgtaatcccagcactctgggaagctaaggtgggtggatcacctgaggtcaggagttcgagaccagcctggccaacatggtgaatccccatctctactaaaaatacaaaaaattagctgggcgtggtggcgtgcacctttaatcccagctgcttgggagactgaggcacaagaattgcttgaactggggaggtggaggttgcagtgagccaagattgcgccactgcactccagcctgggtgacagagcagcaaaaaaaaaaaagacaggattggagcaatgtcttatgggattatgggaacaagacttggggtgcagcttaggaggctgagagagtttccgtttgggagagtgctgggcccatgacaggagaaggccacttactgttctttttgtggagagtgatgcagctgctgccagctggggtgaggcagatgtcagatcccagaaggcaccctaactccttggtctccaagaggcatcggtagcagcgcaggtatttggggaatggaagtggttgagggggttcccaattgacaggaacaaacttacctagaacacagagaagtgctgaccccactcacaccccattctacctcacaccctaccactgcctgattccaggccactcagccccactcctccctcccttcctgtctcagaaaaccatcaaagccccaattctctgcttccttccccaactgcatacacatacatcccccttttcctctggtcctaaggccagaccacatgttaacaaatccccagacccagcagagcacttggtgttaggcagaggaaagtgctaaaccaacactttgaatcctgtgtctctgtggctggtgctttgcagccaagtggggagcccagcaggctggactcagtcttgttctatcctgtggattctggttttctcatccagcacactccctaaccctccctattctatgttgccctcagatccagagaggattccttcagtatctctattcaggtcactgctgtgaagtgagacagccctggggtggtcactagaaatctccttcagaggctgggtgcggtggctcacgcctgtaatcccagcactttgggaggccaaggcgggcaggtacctgaggtcaggagttcgagaccagcctggccaacatggtgaaaccccatctctactaaaattacaaaaattagctgggcttggtggcttatgcctgtaatcccagttattcgggaggctgaggcatgagaatcgcttgaacccgggaggtggaggttgcagtgagccgagatctcgccactgcactccggcctgggatacagagcgagactccatctcaaaaataataataataataaatttttaaaaatcttcagattgcacatcagtccatgagcaggcattccctaccaaacccatctgtcccatctctcctcctgcatgggtttacctgagcatcctggacaggtgtacccagacacttggtgtctgtgggtttctccatccaggccaggagacccttctgaacccttggagccacttaccaaacaccaagctcatcatgaccagcactattaagaggaccgtgtagagggcttgggggctgctgtggaagcacaggggacccagactctggctccctgcagggcctgccataaaacgcatgactgcctgctggcctccagtttgggcttatattggtggaagagaggttggccaagaggaaggagagaggcaacaccagctcagggtggaaatcagtgccagaccagccagaggggcagaatgttcgcacccacagccactctggggcataacatcctgcttgagggcaggggaccagcaataggggaatgagaaaaggaactgtctttcctattaattggacagatgtttattgaatcactgcatcagatgttggggatacaaccctgcacaaagtctccaccctcacagggcacagtctagtaggggagacaagtccaccagcaatgatgtggggagggcagagtgctgccaggagcacctcgacagttaaaccactgaccagagggatttcggcagaggagtaacttgatcggatttctgtttataaaagattgccatggctgcacattgcatttgggtcaagagtggaggccgccgggaagtaggacgctattcccgagtccggtcacaagatggcggactggtccggcagaagacgagcagggacgaggaagcggggctaatgaacctgagatacagttagaagactggacagatttgctgttggactgaacgaggggtgagggaacaggggtaggcttgcacaaggaagtggtaccattttccaagataggaaacatgtggtctgtctcaaaaaaaaaaaaaaaagcaaatagggggtgcccagtcccacttctcataccctggggacacctgtcagacatcctaaaacaaggacacctggatcccaagcgatacgtactcagctcagtgctcccttggggttccaggaacccagcgccttccctcacctcatcctttttcctgccccgcctgtgctcagctgcggctcagtgggcctgaactccggagcccacagaatctggcgctgggcgtccgctctccgcgcctgaccgcacctcagaactccggtaggacgggggggtggccccccgctcaagctctgttccctggggaagaaacctggaaagtgcgaaccgcgcgtcgggacccaagcgtcgggccccagcggacatccggagcccgaagcggctccccaggaaggcggcgccgtagcgccactctccctcccaggcgaattctggagaccgcggccccaggcgtctcacccattttctccgctggggacccgctgggctccccatccacgcctactcggtccccaccccaccagctcagtcttgactcagaaactcagggtttttacttttaggatcgttgggctgtgcgttaggggaggaggtggtcctcagcgtcctggaacgacaccacctgctccaatttcccgtctggaggttctggtcgaggctccgaactcgggttccctgctacctcccagactattcaagaattatccagtcccaggatgataagggggaagatgggaagaaacagacgggagacgcccgcccagaaagactgcgggaagaaagaaattcgagaggaaactgcacgccactgagcgcctcccaaaagccttggaatgaatgaatttaaaaactatattagggccggactgcggtggctcacgcctgtaatcccagcactttgggaggccaaggcgggtggactacctgaggtcaggagttcgcacccagcctggctaacatggtgaaaccccgtttctactacaaataccaaaaattagccgggcgtggcggctcatgcctgtaatcccagcactttgggaggccaaggtgggggatcattcgaggtcaggagttcgcaaccagcctgagcaacatggtgaaaccccgtctctatcaaaaaatacaaaaacattagccaggtgtggtggcgcacgcctgtagtcctggctactcgggaggctgaggcaggagaatctcttgaacctgggaggcagaggttgcagtgagccgagatcgcaccactgcactccagcctgggcgacagagtgagactctgtcttaaagaaataataacacaaaataaattgtattagagaaaagccagagtagtggagaactgcagaggaacgcggggcacctacataaatgtcttgaatgaatgagtgcacagagtgatagacaaaaagaatcagagggccgggctccgtggctcacgcctgtaatcccagcactttgggaggccgagctgggcggatcacaaggttaagagatcgagaccatcctggacaatatggtgaaaccccgtctctactaaacatacaaaaattagccaggagtggtggcgcctgcctgtagtcccagctactcaggaggctgaggcaggagaatcgcttgaacccgggagacggaggttgcagtgagccgagatcgcgccactgcactccagcttggcgacagagcaagactccgtctcaaaaaaaaaaaaaaaaaaaaaaaaaagagagccagggctcctcttgaagcgaagagggcaaagggcaaaggggaagcacaggggaacttcgcggcgccctctgaagctccctctcgaatataatcgcaacgaaaaggccaacgactagaggctttgcgaggctgaggctgggcttcgggaggggattgccctgagaggtccgggaggacttgctgtggaattcaagcgaccgtgggccttgagggaaccggggggcaagacacccacccagcattcgcggaatatttcctcgaattatttcggggaggggtgaggccggggcagggtggggccttcttcggagggggcgcggcctccgagtaattaatcccgtctttgttgcgttttgctcctctcctgtccacccagcagggccagcccagggcgcgctaagagtccagagagttcgtttccatggtgacgggttccgcgaaggttttcctggggtgaagaggcagggcgttgaataatcgccatggcgacagcagcagatgacggtgtcccttctgagtgctcctacctagagttaagggatacctgagggtaagcaaccgagtgacgaaacaaagaaggcggggcctgaggacagaacgccaaggttaggggaatggagccaggcaaacgaggggcggggctgtagatgacccggtcgggagagggccacggtttgttgggggagcggctcgagattgcgttctagagaggaaccagagagagggtctttaacctaaatataaatgaatgactggattcctgaagaatccggaatggcttgttgattggatagatggatggatggatggacggacggacggaccgatggatggaaatctggctatcactgacgcctgagctccccaccctcttgggccctccacctccggagccctcactcgcttgtgacagctgtacgagaaatacatgcctctcctaggagcaaaccctcaacccaaacaggcagcacagagccagtccagcacctcacactggaggcactcagggtggagcccaggtcgatgagacggcgtaggatgaggctttttggcccagctgggaaccacttctttccagatttcccgtccagagtctaactttcctttctcccagcgccatcttttctgctagtttgcccagctcctcagggtgcctggactttcaggcctcaccttgtgtccagtatagcagggtccagcgccccagcaactgggaaggtctgcatctctgctgatcatcccctggaactgctggaactttgctatatagggtgaggagtggacaggggcctgcttccacccctgggtggggattagttctgaaaacaaacacagctgctctgaaccttattgcatagggagtaatctgaagtaggctgaggcccctggatgggggggttcagaattcacatgttgagcctacctttctttccctacccaatttcaggtatctaagggcccctcaggtcatccactgttgtctacaattacatgcagtaagatgggggaaagtggcagtaggggcagttcagcagagtccctaatggccatgtccagggaggggtgtcctttgtccccagggtatgggaggtgagactgggcacccctatttgctttttttttttttttttgagacagagtctcactctgtcacccaagctggagtccggtggcacgatcacagctcactgcagcctcaacctaccgtgatcctcagccaagcgatcctcttacctcagcctccagagtagcttggaacacgggtgcatgccaccatgcctgggtaatttttaaattttttgtactgatggagtctccctatgttgccctgtccagtcttgaacttctaggctcaagtgatcctcctgccccagcctcccaaagtgctgggattacagatgtgagccaccatgcccagctcctctttgcatttaaggagcttcccttagctgaacaaaaatttagttttcaggggattaactcttctgttggatctgggaggatgggattcagaactgtgcagctggctccagagcttcatgttccacacttcccatcgtttgcccccctggaatgggatagaggagagggcaccagtatcagctatccacctgtttgctaacggtggagcattatggagctgtggtcacctgcctcttctaactccaaatttcaggcatcacatcacctgattaagtctcagatctccacttccagtggagactcagtatatcttcccttaaggagttgcagcgctaatgggggcacacacagcctctgccctggggtttcaagaagagcttcatgcactgggtttggagaagacacagaaatttagccagagactccatctaggacattagaacattgtcgcccacgttaagtatcttgctcaaaagaatggagttggccgggcgcggtggctcacgcctgtaatcccagcactttgggaggcagaggcgggtggatcacgaggtcaggagatcgagaccatcctggctaacacagtgaaaccccgtctctactaaaaatacaaaaaattagccaggcgtggtggcaggcgcctgtagtcccaggtactagggaggctgaggcaggagaatggcgtgaacccaggaggcggagcttgcagtgagccgagattgtgccactgcactccagcctgggtgacagagcgagactccgtctcaaaaaaaaaaaaaaaaaaagaatggagtcggctgaggtgggtggattgcctgagctcaggagtttgagaccagcctgggcaacatggtgaaacctgtctctactaaaatacgaaaaatcagctgtgtgtagtggcacacacctgtaatcccagctacttgggaggctgagacaggagaatcgcttgaacttgggaggcagaggttgcaatgagctgagatcgtgccactgcactccagcctaggcgacagagtgagaatccatctcaaaaaacaaacaaaaaaccatccccaacaaaataaaacaaaacaaaacaaaaatggactcagggcgataaactttggggtctttcatctggaaaagagaagtttccaaatgaagaaagtggccagcggccaggcgcagtggctcacacctttaatccccaacactttgggaagccaaggcggttggatcacctgaggtcaggagttcgagaccaacttggccaacatggcgaaacctcatcttcactaaaaatacaaaaatcaactgggtatggtggcgcatacctgtaatcccagctactagaggggctgaggctggaggatcacttgaacctgggaggtggaggttgcagcaagctcagattgtgccactgcactccagcctgggcaacatagtaagactccatctccaaaaaaataaaaaaaactgccaggcaacaaaccaatgggtggaagagggatttattcactgtgttccacaaggtccaaagttagagatagatggcagttatagggaaccaatttcctcaggtacaacctaagcatcttctcctaacagagccgtccaaaaggcaaagtatggctctgagaagacatgagtccttggcacctggccctccgtccctggcagggcctgtgtttgttgaactgcaaaaaggctgtgaggacagagacttgatgacatggcaaggtgggtgtgcagggtttgctgcataagacgtggggagcaggcccttcctcactcttcaccaagataacaagaggtgagcaatgaaaattgggggtactgctagtaacaccatgcaggttgaacctggaaaccagcagaagcactgggtaggtgaaatcggatcctagaaagctcatgagccgtaagcaggagggggcaaccatgggctcctggggtggttgtatgcaggaagaactgaagaaggaggcgggaggggccagggaggctgcacagttgtgataacagtaggcacatcagggaccggggaggtttggggacctgctgcctgaggaaagctcaggttaggggctgaaggcctagggggacacagagatgggaagggttagattagctagattgtctagagttagggtttcccaaagcccagctctttggggcctctgctctccccactacctgcccctggctccctggacacttgagaagttatacaattagccagatagtagaaaaaatacctttttattaattattaggaataatccattcatgtaatgcaggatgtatgttggagaaggttaagtacagccacatgaatgaggggaaacgtgcaagaggaacagtggtgagaagggggatggtcccccactttccacaaactataaacagcaacatgaacacagagaatcacaaataagagggtctttcctcatgtctcctctcaccccattcttccataatgagtcccagttggtccctagaggtgccagggcatctggaagttctgggctgggagtggggtgcagtgagtggcctcaaagttgtgcagatgcttccgagcctgaggaaaggaggtgggacaggtggggtacagagcactgttgggaggggcagccactggactccctccccaccctccacttccgcatccaccacccactctacaaaagctgccacttccaatgcttatagggtatccccagtccccctatgtgagccctggccattcaagaacccttcccacttcccactccttagctcaccagaaacaaagccagctgccgccgtccatctgcactcatgtcctcccctgcagagaggaggcgctcaaaataggccacacatctgggtattcatccccttcctaggcccttcccaccctctctcctgccccaggagctccttacccacgctccaggggaagtcgggcccgtgttctgcctggtaggagcggaggacagacagacaccagtcctcttccacctcccatcggctataaattgaggctggtcagggagagagatgacagccagtcagcaacctgaccttgctgggcccccgccccaagcctcactggatcccttctcaccttcctccagctgtgaggaggcctccaaccactgcctcaccactcgaagaccctcctctgccatcacccggggatacctacggaggaagtgccaggacaggtcagggctgattttttttcattcaccatccctgaaccttcctccctccttccctgtgctggtatcagtatctgtgtgtgtacactgcccccagcgcgcacacaccctggctctcaccgatgctgcaggagcttcagcaggaggtcattgcctcggttggacatgatgtcctcaggaaccctgggggtgagaagaatgtaccctggaggggctggaggttaggaggaagggtctagatacccaggtttctggtgggcagaggtagaagggacaagttcctggccatctctggggttcctgagggccgagattcccacgcactcacgtggtggtgatgatctcatccttggttctccggatcagcagtacaggaccctggtatcttcagagaacagagcagtgggaagggagagctcagagggagacgggtgacaactggcccacccctatccctgcactggtagcattcttaccctccccttgctatagcacagcccttgacctagcccttcactcaggggtgagaggggattatttaaggggcatggttcagtctggccctgctgggagacccctgccgtgccaggccttaaccctttggttgccagatcctgaggtggtccagagtcccaggggacctgggaggggttaggccagttgaggtggtggcagggtcactcaggatgtgagccagtggccttttaccaacttgcactttagtactagtttcagggtttgagcgcccagcagagctgtatggggggcaggtgttcaatgccggacgctggccggccctcacctgcacagctgctccgcgttgtttagattgagatgctgcctcacggtcctggtcaccaggccccctagagtgggataaaggtgaagggatggcagagacaaagcccttgcccaacataaaggtcctcactattcacggagaaagaaaactgaggcccccagacaaaggagtcctcctgcttccaacaatggggcgacttactccccacccaagaaaagggagccatctcagaacagttcccagttccagcccaccccttcccaggaagggcaggcctgggagctgcactcactccagctgtctggcatgaccttcaaggccaagggcaccaggtcatcaaaggaggcatccaggatcatggcactaacatctgggtaggacatggctgcccacgtggctggtaccagggcagggaagaagagtaagaactgagaaaggctcctttctccccaccacccatgctctcatcccactgaccctataggccaaccccattccccctatgttatcccttgtttttttcttaacctacttcacttggttagggaactatctggagaggatggggatagaacactggagatagtgcactgaagataatgggcaggaaacattcactttccctgatctccccacccaggacctgggtctgcttttccttttaatgactgggcacaagaggggaaggaaaggtgaagtgtatgcaaataggatagcttcttccaggcccactcagagattctacttcctctctcttcttccttgagcctccaccccaccccatttccccacctctcccgggtggggctgggtggtcatgaatgtgtctacagtgggggatgggagggaggctggtaccagtgaagccgccgatggaccaggcgtagatgatgatgtcctggggctggaagcccaggcggtggatggcaaactggaccaccacatccatggcattagcctcattctgcgggaatggcaccccctgcaggagaaagggcaaagtcaggagtgtgtcagcaccaaaggccagctcacctgtccctcccaacgtggacccctcctgcagccacctatgacaggcagagaaggtgtagaaggaagggatggtaggagaggttgttctctccagaagacggatgtgtacaatgagatctacctcctcctctcctgctagccccgcactgtggggatgggggcatggctcccaatgctgccttcacaacctcctagaccccagccctcaggtgagtgggaggccttcaagaaatccacagcccctctcctccctccaatggctgaccagagggaaacagacataattcaggaaaaggaagggattcctgagatggtctcaccgtgcttccagcaaagcctggatgattccagcccaggactgaatatccagctgtaacacagggggaggaaggactgagaccttgtggcccacagccctttctccatccctgggggaaggaagagcagaagtaccccccagcttagatgcaaataactccaagccttcccagaaataggagatgacaccagaggttctgaggcagcacagggagcagcatgtgattgtgtggggtgtgtggtgggggaatggaacagaatgaaaagcataatagctagggacacaggccaggggagggatgtaaggttatcaaagcaaatggcgagtggacttttccctaaagctgagagactcaaaacctcacccagagaaagcagaggccaggggaggtcaggtcagtgtgggaggcagggacattccctttcaaagggcggagataaggaggctgagtcaccgtcctaccttccaggggcgtggagacgcagcccacctcataaaacccagcattcccctcacagcagatcacctaggaaggaggcaggaaggaagggctggggggccaagttgggactgaaaaactccctttgggcagggagggcagcccatgaagagctttgcagggaagaggaaagggcaggtttctgttttctccaaggggaatggaagcttctcattccacagggtccataagaggagaagcaaagggattacaaatactcctcagaggctgacctgctcgaccacccagccatgtcttttccttggaagattaccagctggatctctttcaggaaggggactatggagatgtttttcctttctcgttttcgggtctgttatcttctgtgaccattgctattgtgtggtatgctgattgctctccctatccctctctgagctccagtcttatggtcagataaactgtaatgccatggcgccccaagctgaaacccacgaatggtgggatttgcatgaactctcataacagatgggcagagccaggactagaacccagctccctagactcctggcttagcgctctttccacggctgcttcatggaggtaggagactttgaggccaggctgcctgggtccaaataccagctctaccacttactgtgaggtccaggaaaggttttctgtgccccagtttcatctcctgtaaaatgggctaatataagcagtacctatctcacgggattcttttgagaattaaatatatatgcttcatatatatatgagaattaaatatatataagtgtgaagtgctgtcaaagtggtaactattaatattagtttctcgtccttgaacgtctctcctacttcatctgtttctctatcacagggtttcactacatcacaaggtctttagcgtggagctaggacatgagattatccccagtagtggttccttcagggaggtgctatagcattggggtccccagacctctactgccttcctcacactcaccccacctctgggctctctgctccctcttaccagcttctgtccctggggctcagctgtcccccgccggtccacaaacatggtgtcaatctcattgccatcacaggccagcagctttgcccggcgcccattacactgagtacggaagacgcaatggccaagatgcaagggtcaggaggccacatcacaggggtggggcggggtgggtgggggtgagaggggagggctttaggggatgtgcgggcagggaagcctcacctcttccaccagtcgggcctggccctgcagcagcacaggcatgagggccttctgcagcaggtacacagagcctggatacagcatccggcgccctagggtgtgcgccaccaggtagctgtggggaacacaggttaacaaaccccaaccctggtgaggcctggggactgtgctggggaccatcccagccctagcactcacagactgtaaggcctgctttacccctgaccttcacagctttactttcctctttcaagccttaatgaaatatgtaccaggctagtgttttgcaaacttttcttactgcaacctttgtaagataaacattttatattgtggctcagtgcacacatatcctgtatgtacagaattctgagagttttatgatgtaactgtctatacataataagtaaatgcaaagttatcatcagattatgattctgttaaaatataagtacaacatattaaaggtccccaaataaataatgctttaaaaaatgatggttataattcaaaacctcaaatatggcttgcctccctgactaattagcacactgtcaacaaccaaccactaagtccaccctgttccttggtattctagaagctgcctcctaactcccagcaaaagaaaattcccagtgtctgttccactataagatataggtggttatttccgttccttctgacatcatcagtacccacgactgagctttatttgggatttaccatgtgctctcaagcacccaggcaaggcaggagcccttcagaacatgttaccttacttaatctcctcagcaaccttgcagggcaggttcatcacaggtgcagacactgaggcacacaggggcccggagccaaggtggaataacaacagggcagaggggccacgatgggtacacagatgctaccagagcctgccctagctacaagtgtgtgtcctccccacccccaccccacccccactgctccttttcagcctcactgaaggagcttttgttcatatcccagttctttacttactacatttgagactccagacctctctgagcctcttttcttcaaacataaatatggataaaaatgactttgccataaatgatctacacaaaccatacagcactaggcccaatgagtgacagctattttacaatggagcgcccactcccagagcactcctgaaatggcccctccaccccagtgggcctctcctcgctgctgtttcccacctggtgatctgacaaggcagcttcttaacccggttgaggagggtgtctgctgtcccccggtgcaggggctctgggcgaagcagggccacaccccggcgggaagggccccctcgagactccttcctgaggaagggaaagatgcagggaaggatagggtcaggagcagcaagctggatgtctgaggtctggagaacagtggggtctaggaacgacataatggcattggaaggcaggcactgtgacctgagagggcatggaggtgggagggcagagcagagattttctggaatggttctaaggggagagatacagcaaaagaactggggcctcaccggctgctgggttcttcccagtggaagtcgactggccagctccggaagtcaaagttgtagttggcaagctgcctctgcagtgggcacgagaggcaaaggggtactgagaactcaggggaggctctcctacccaccctcaacaacaccttcgttatccaggggtctgatccccacacatcatggggaaaccaagcggaggtcaataccctcccaattctcagatggaaaattctaacaggaccagaaaatcaggggagatggtatgccccatcaggtatcaggactggcctgtctgccctcttccaagctaagaacctaacactctgcttttctaaaaaactaagtctgacccacccccaggaggagtggctgaaggtgctagtgcttttgagtgacgggtagtaggggtcgctggctggtcacggtctattccccacctgggtcccttatagggtgctgtcttagaagcttagaaatctcccagcagatcacactgacagacccaaggttgagtgagacagagaggagggaagtcacgcccacagtgggctcctctgccatgtggggccacccgttgaaggaagctctgacttccatcctcacaactacatcccttcctcaactcctgcagccatggatcagtgttgccctacagcccatccgaacctcgggccaccccactgagccagtccacatgcctttttttttttttttgaggcagggtctcgtgctgttgcccaggctggaatgcagttggtgcaatcatagctcactgcagcctcaaactcccaggcccaagtgatcctcctaccttagcctctggagtagctgggactacagacatgtgctaccatgcccagctaatttttaaaattttctttagagacaaggtcttactatgttgcccaggctggtctccaactcctgggctgaagcgatcctcctgccttggcttccgaaagtgctgggattataggcatgaaccacctcaccagctccacgttttttgacggcagtgggagctgtgtctttttttttttttttttttttttttttgagatggagtctcactctgtcgcccaggctggagtgcagtggcgcgatctcggatcactgcaagctctgcctcccggcttcacaccattctcccgcctcagcctccaagtagctgggactacaggtgcctgccaccaccatgcccggctaatttttgtacctttagcagagatggggtttcaccatgttagccaggatggtcttgatctcctgacctcgtgatccacccgcctcggccttccaaagtgctgggattacaggtgtgagccaccgcgcctggcctagctgtgtcttaatacttgactatattcgtcccccaccccctgagctcctagcactctattttgagggtttttattttctgcacagaaattttttgacatttcaaaaataatttgactaacagagagcaatagaaaaattatacaaaaaggtaaatggcaaaacaaaacaagatgactaaaagcaaatttcaggcaggctttgctcagacctgctctcaaatctggacttagccactttcttgctctatgactccgaatgggtcacttaacctctttttgcctctgttttctcacatttacaaataaaggtaataatgccacctcactcagctgttgtgaggatcagaaagggtgtgtgccaaatgcttcagccagtagcatagtacagggcatcattacgcagctccatagtgtggagtagccaggaatgtgatgatggtggtcatagctgtttgatcctagaaacctcccataacagaaaagagctttatggggccccaaagcccatcctcaaagataatcacagtccagcaccagccggcttggcataattcccaagacactgagccctagcttttctccctcctggcaccatgctgtactcccaggcataggagtggacacacctgtccaccttgtcccatccacaaacaaggatagcatggtattcaatgcatacaacaaaattaaacatttatagaactgagctgctgtgatacagagaaaactaccttctaagaaacattgtgggctgggtgcagtggctcacacctgtaatcccagcactttgggaggccaaggcaggtggatcacctgaggtcaggagtttgagaccagcctgaccaacacagctaaaccccatctctactaaaaatacaatattagctgggcgtggtggcgcatgcctgtaatcccagctacttgggaggctgaggcaggagaatcgcttgaacccaggaggcggaggttgcagtgagctggaatcatgccattgcacgccagcctgggcaacaagagcgaaactccatctcaaaagaaaaaaaaagaaacactgtgggccaggcacagtggctcacacctataatcccagcactttggaaggccaaggcaggcagatcgtctgcagtcaggagttcaagactagcctggccaacatgatgaaaccctgtctctgctaaaaatacaaaaattggccaggcacggtggctcacgcctgtaatcccagcactttgggaggccgaggcaggcggatcacaaggtcaggagatcaagaccatcctggctaacatggtgaaaccccgtctctactaaaaataaaaaaattagccgggcgtggtggcaggcgcctgtagtcccagctactcagggggctgaggcaggacaatggcatgaacccgggaggccgagcttgcagtaagctgagatggcgccactgcactccagcctgggcgacagagtgagactccgtctcaaaaaaaaaaaaaaaaaattaactgggcgtggtggtgtgcacctgtaattccagctactcaggaggctgaggcatgagcattgtttgaacccgggagttggaggttgtagtaaactgagattgtaccactatactccagcctgagtaagagtgagactctgtctcaaagaagaaaaaaaaaaaaagaggccaggagtggtggctcacgcctgtaatcccagcactttgggaggctggggcaggcagatcgcctgaggtcatgagttggagaccagcctggccaacatggtgaaaccccgtctccacaaaaaatacaaaaattagagggtgtgggtggtgcgtgcctgtaatcctagctactcaggaagctgagacaggagaatcacttgaacctgggaggtggagagtgcagtgagccgagatcgtgccattgcactccagcctgggcaacaagagcgaaactccatctcaaaaaaaaaaaaagaaaaagaaaaaagaaacattgtggaatgtttctagtttagccagttcttacaggtgagggagggggaagattgttctagcagaatattccattagaagtggtagggaggaaaaattcctcaggtggacagttcactaatggaggtgagaagggatacagcaatgtgcaagcaaacacccagtgtggtgggtggtaaaacacacctcctcttcctgcagaagccagtgtctggtgctctgagggacaactgagaaagctgctattgggtgcctgtgtggcacttttcctagggcctctcaccttgttttctgaagactggttccgatgtgttgcttccaagatggtgatgaactgccggtactgggggttggtccagcggccaatgcctggtagaaaaaggacaggaaacagtgctaggaaaactgggaagcagaaagcctaggttttaggaaaagaattggagatgggctagaagaaggccctgtaagaaaaagtgaaagaaaaaggaactgagggcataggatgcggagaaatagatgtgagccaacccccttcctccaaatccagcaactggctacaggacgcttcttctccctagcttctgcagtttgtgtctttatagacaatccttaacctaccatcttccagaatgttcctcttcctcagtctttaaacactgtcatataacctattaaatgacactattaaacactatcatataatactattctcccttgcgaatatcaaatttctctatttttcactgccactcttctccaatgtttgctttctgcctcttttctgtatattctagccccttgccatctggcttcagagtctccgactcctgcccataattacttcctcactgaattcctgactcttctatcctcattctcttcaactgtactactcagcattctccctgtccctcaagattcttcctgcctctgcttcctgggcccatccttgactccttccagttcctgaacagttcctctcctgcctcctttctgctttcctttctaaagcagaagcaactctcagtgctgactctctctcctctctcttttcacttacacagtcagtgattgcatccactctcctttcactgctgagccacctcaaaccctaacttctctcctcactgacttggcaggtgtcgtgtgtcagacaggcaccgtactacacacgggagactcagcaggaaatgagatacacagctcctggctctcagagagctggcattctggttggggttaggtacagccaggagaagacaataaacaacatttcagagagggataagtgctacagagaaaatacaacaagaatgaaccagaactttatgtgtcatcaatggtattcccccaaaacgatatgatgagagaatgatgtgtgctgcagaatgatttgtacaacatttatgccaaaaatgtaaaatgtgcaaaataatacatactgcttatagataccatatttcatagattctaaaatgtatattttttaacccttgaaaactctgaaattagaattcattttacaattgatggcagcttagacttgaggaactgaggtatatgtttcataaaagtatgtgccagaaaaaaaaaaaacccacaccaaatgacaattattacttctgaggaaagaggaagatgggactgaaaggattccaatgggaactccaaccctaactgtggtgctttagtattttgttgacagaaagcatttaaagcaaatatcacaaaactatatataaaaaaaaaaatcacaaaactatacatcaaaaaatttaaaaaggcttttatattttgttctctggacttttctgtattttttcttttttcttttttttgagacagagttttgctcttgttgcccaggcgggagtgcaatgatgtgctctcggctcactgcaacctccgcctcccgggttcaagtgattctcctgccacagcctcccaaatagctgggattacaagcgcccgccaccatgcacagctaattttttctgtattttttctaaattaaaaataaataaaataaaaaactaagacaaaactgagcagtgggagctacttttagacagggtggtcagggaaggcctctctgaggagagagcccagtcctgcagagatcagggggcagaacacctcaggcagaaggtcctggacccaactgcgaccatccagccctgaccccaccacccccatgttgaagcatcgcccatcacctggttgtcatcttatgtacccactaggggtaggtgatctgtcctctttatttttttaaattgcgagatacaacatatgtacataaaacatatattcagtttaaaaaatacaaagcaaacattcatgtgactatcacctaggtcaacaaagagaacacagccacctctcagcagggctctcccccactctgttctcccccaccccaggtaatcactctcctaacttttgagaaaaccatgcccttgctgggcgcggtggctcaagcctgtaatctcagcactttgggaggccgaggcgggtggatcacgaggtcaggagattgagaccatcctggctaacacggtgaaaccccatctctactaaaaaataaaaaaaaacctagccgggtgtggtggtgggcgcctgtagtcccagctactcgggaggctgaagcaggagaatggcgtgaacccgggaggcggagcttgcagtgagccgagatcgcgccactgcactccagcctgggggacagagcgagactccgtctcaaaaaaaaaaaaaaaagaaaagaaaaccatgcccttgttgtcttcggtgttctacctcaaacatgcacatcccttttgaattttatataaatgaaaacatactgcatacattattttgtggttagcttcttctatttaacacaacatttgagaaattcatctgcattgcttttgtttatctggagacagagtctcgctctgtcacccagactggagtgcagtggtgctatcttggctcactgcaacctctgcctcccaggttcaagcagttctcatgccttagcctcccaagcagttaagactataggcatgtgccaccatgcccagttaattttttgtattttattttttctgagatggagccttgctctgttgcccaggatgcagtacagtagcgcaatcttggctcactgcaacctctgcctcttggattcaagcaattctactgcctcagcctcccgaatagctgggattacaggtgctcaccaccatacctggctaatttttttttgtatgtttagtagagacggggtttcaccatgttggacagactggtcttgaactcctgacctctggtgatctgcctgcttcagcctaccaaactgctaggattacaggcatgagccactgcacctggcttcatctgcgttgttgagcgtagctacagtttgttcatttgcattgctatatagtgttctcttgcatggctattgcatggaacttttttttttttttgagacggagtcttgctctgttgcccaggatggagtgcagtagcgcaatctcgtctcactgcaacctttgcctcccaggttcaagctattctcctgcctcagcctcctaagtagctgggattacaggcacgtgccaccatgcccagctaatttttgtatttttggtagagacggggttttaccatgttggtcaggctggtctcaaattcctgacctcgtgatccactggcctctgcctcccaaagtgctgggattacaggcatgagccaccacacccggccacacagaacatattttatccatcctactatttgtagccactggagttgtttccagcttaggattattacaaacaatgttgtatgctgtattcttgtacatctatattgtttatacatgtgcaggagttttcctagtatgtatacatatatagaattgttgtagggtatatgcatcttttctagataaaagcagccaggcatagtggctcacatctataatcccagtacttcgggaggctgaggtgggaggatcactttgagttcaggagtttgagaccagcctggacaacatggtgagaccctatctcttaaaaaaaaaaaagcaaacctttttgttacttttcagttattttttcatatttataacccaagtcttttaaggaaaagatcatgccttaaaccattctcaatgattccctctcggaggcccatcactaaaatgtatttgcacaaggtacttaatttttaaccagtgacagtgacagataagattcaaaccaggtttcctctccacctacctcggaggcaggccacacctgccagaagtagcagcaatgtcccagcatagtgagaaaacggcaccactttggacaaactcaagtaacctgggaagggagagggacaatgtgagaccctctccgcaatgtccctcagctcctcttcccagttcagccccaacctccaccccacactccctgtttggaacagccataccctaagaggaagaagatgcctgatggaagagggaagccaagccatcttcacaggtcccctctcctctttagggagctggctcatctgccaacaacctgcccatttgctaccccaccacctttgaaaccacactgacctttcctgtacaagtagaagaaggcgaagggagaggagtaataagagatggaccagaatactgaagcctgcagcagagagacagggacaggcaatcaatacacacacacacacacctgccattccaggcatatactatacactctgagcaagatggacaacctgagggatatcatatcatatttggtgtatgacaccatgaatacagtaggtgctcagtatttgttgaaaagtagtgtgtcaatgtaatggaggctgggaaaatttggtacaggctctattttcttcctctggaattatggaagaattatgtcttccatctccagacataattccatcacatttaaaggcagtctctctgtctactcaagttaatcaagccttttcaattggccctgctcaggacagcccctggcctggtccccaagagatgcgcaaacgtcaccacaggaactgtgccagaaagaacagctgtccctgcagccaaagaggttagttgccagggaggacaggtcactggggaactgcaggacttagcacctgcagatggtcccaagagtaaacatgttttccttacggctcaggttgcccccagagaaagcagtgctacataccaaaggggagtgccaagtatgcacatttagagtgtgcctgtgtgtctgtgttggagaggtctgctgcagagcccagggcatcccccaaccccagggcactgttgctcccaagttagggagggctaagttcaagaggacaggtgggtctgaaagatgcagagtcccagatgccagggtagacataccagtgccaggatgctgtcagcatgtttctccagggcacggggctgatagtacgtatcctgccaaaacagatggcctccttaaggaccctgcccactggcaggtcctttcccttccctttcagaagccctgctgtgtgtcctctggttctagtctcgttgactatctctcttgaaacatccctggcccccacagaaactcctcttcctcaccctcactctgaacctaatttcccacccctgaccatgggaacaaacacagggagctggatttggaagcaaaagtgaaagcagcattggacgatttttgctccttttccacagcctagtttcaaatggattgcaggcgcgtgcatgtggggagaagggttagtttgagaagaaagaaaagacacctagacaatctaagaaggaaagaaaagcatcagaaataagagtagttgactaagaagagaatgtgggtaggagcgggcagtttgtaggagacagtaacacaatgagacaactgataaaaaggaagagaatatttagaacagcctaccaccacccgccagctctccagaatacaatgactcgggtctccaggctaggttgggcgggggttgaggggaggaccgacggatacaggatctgtaaaagtcattctgaaattcaaggcgagggtaaagggaagataaaaacagagccgggggaggcatgaagaggcactgaagaagaggaaactgggagtctgacagcaaaattcaacggctccccagtccgcgcagggtctcttcccgggactcaagactcaactgggaccggcacgaaccacgacacacagggtcggggggacgcggagaggaaagaacaaagagtggcagtcggaatgagaaagcggtaaagagcgaaaaagaaaggaggcggccagtccgtaggcgtgactttaactcaggaagcacacagagcgcagattttgcggataactggcttgacaagcaggctccccttatttcccattatgggcacttctggggagcaaaaggccgtaaagggtttggactgtaccacgttcttcggtggggaggaactcgactcacccaggagctggaatggggggcagtgactgccgttggcgtctcagggacgctggccggggccctttcagagtccctctcccggtagattttgtagagccgggggcctaggacgcagctcagcagcttcgccatggccccggctcgggccgctgctcttccagcagcaggtccccctgccggccccgccctccctgcctctgaggtgttgtgtgcccttgacgtcagcccgtaccggctccgcctccgggcgagttgcgacattttcagtgcttcctgagaagagtttcgcgcagttggagctacgggtacagcagtggtccgaaactagtggaagaccactagaacgcggagaatcagaaaattaccgggcatggttcaataatttttttctgtctcattattggcagactctagagcgacagcggaaacgaggggtgagattaggagtacttgataagagtaaccgaaaacataaggtgtctaggaatgtatctagtacaagaaatgcaaggttttatgaagaaaactataaaaagttattgaaaaggcaaactggcccggcccggcgcagtggctcacgcctgtagtcctagcactttgggaggccgaggcggggggatcacttgaggccaggagttcgagaccagcctggccaacatggtgaaaccccatctctactaaaaatacaaaaattagcctggcatgggtggtgcgcgcctgtaatcccagctactcgggaggccgagacgcgagaatcgcttgaacgcgggaggcagaggttgcagtgagccgagatcttcccactgcacttcagccttggtgacagagcaagactctgtctctaaataaataaataaaggtaaactggcccagcgcggtggctcacgcctgtaattccaacactttgggtggccgagggatgattgcttgcgtccaggagttccaggccatggctcatgcctgtaattccaacacttggggtggctgagagaggattgcttgcgccctggagttccaagccagcccaggcaacatagtgagaccccatctctacacaaaataccaagggggaaaaaaaaaagacctagcagggtgtggtggtgcccacctgtagtcccagctacttgggaggccaaggtgggagggtcgcttgagcccgggagtttgagatcgctccatgcactccagcctgggtgacagagccagaccctgcctcaaaataataacaataataattgaaaaaataaaaaaagaaagaggtaaacgaaaagcttttcaataaatggaaagctacaccatggtcctggatacgaaaattcagcacagtaagatatgcggaatatttgtaaaaagaaaataaatgaatcattactgttatgcatgaactggatcttaaaaccatgatgctgagtgaaaatagaaagccacagaagaatgtatacgtgatactagtatattagattcaaaaacacataaaatttaatgataaagcaagtggagaagaaagagaaaattcagaattgtggttacacagcatagaggatctctgactgaaacggaatattctttttttctgttttttttttttttttttttttgagacagggtctagctctttcacccaggctggagcacagtggcacaatcacggctcactgccctgatcctccacctgctgggctcaaccatctttctgcctcaacctcctgagtagctgggactataggcccacaccaccatactcggctaattttacaaggtctcaccatgttgcccaggctggtctcgaactcctgggctcaagtgaacctcctgctttggcctcacagagtgctgggattacaggcatgagccactgtgcctggcctggaatattctatttctttttcttttttttttttcgagaccgagtttcgctcttattgcccaggctggagtgcaatggcccgatctcggctcaccacaacctctgcctctggggttcaagcgattctcctgcctcagcctcccaagtagctgagattacaggcatgtaccaccatgccctgctaatttttttatttttagtagagatggggtttctccatgttggtcaggctggtcttgaactcctgacctcaggtgatccgcctgtctcatcctcccaaagtggtgggattacaggcatgagcaaccgagtccggcctggaatattctatttatttatttatttatttattatttatttatttttttgagacggagtctcgctctgtcaccaggctggagtatagtggcatgatctctgctcaccgcagcctctgcctcctgagttcaagcgattctcctgcctcagcctcctgagtagctgggactacaggcatccaccaccacactcagctaatttttgtatttttagtagagacagggtttcaccatgttggccaggatagtctcgatctcttgacctcgtgatccgcctgcctcagcctcccaaagtgctgggattacaggcgtgagccacggcgtctggcctttattttcagagttggggtcttgctctgttgcccaacctcaaacttctggcttcaatcaaccctcccaccttggcctccaaaagtgttaggattgtagacatgagccaccatgcctggccaggcttcttttactctcattatattgtgagattcaactttgttgcaaatcactaggtttgttcattctcattgctgtccagtcttctactctgttaagcatttatccattatatagttgtacttcatatagtttttggtatgtatggaatatttcatcaaaataattttaaaaataaataaattacacattaaaactgtaataactgcatgaagatctgccttaggagtttttgccgttcagaaggatgaatcagcccgttagccttgtccctgagtaataatttaatacacttattagggtttcaggagaggtccggggtatgccagacaaccacagggaaagtcattccaaatcatttacgggacactgactcgatacacagtcttgtgctgggttctgtggaggaccaacataaaaactcaaactcagtttcttcactcatagctgacatttcttttcttttcttttctttttcttttttttttttttttttttttttgagatgaagtctcgctctgtctcccaggctggagtgcagtagcacgatctcggctcactgcaacctccacctcccgggttcaagcgattctggtgcctctcagcttcctaagtagctgggattacaggcacatgtcaccacgcctggctaatttttgtattttttgtagagacagggtttcgccatgttggccacgctggtctcgaactcctgacctcaagtgatccacccaactcatggctgacctttcttaggagtgaaagagacctcagaatgtacttccagactgacaagagctagacaggcaggaccacttctctgcatggttttttgcatggaaagtctttatttgagccccttagctgatgtggaatcagaagagcaaaaaggtcatcttcagagtggcctgggctgggtccttttctctccaggatagaaaagtggtggtcactttatccctagtagacatgctgctgggctttatcgccccagcattcccatcccctccagagccccttgtcactccagaccagcgagtgtgggcctttatctggactctgcttcctccctggggacaccaggtcttggagcaagagaacttggcaggctctccccatggcagtcttattcctcctcctgttcctatgtggaactccccaggctgcaggtaaggggcaagaggtacgggattccttagctatttgcaaggttggggagggactactgctctttctcctaggagcctggcgaaggcatctgactcaagaagatagaattaccccaaccaacctcctcctgcctctgacactagggaagacccagaggcaacgagggtccaggttatgcagtttcctttataaaataagaagaatgagtaaatgcttccagaaaagtagaaatgagtagaagagatgtgggcatttgccaactttcagccttttccctcttgccctcagaccccctcactggctgggggagagaggaggaaagcccttaccctcttctctccacctgtcttatttttgtagctgtcacttgagaaatgtggtcaccagccaggcctgtgctgggggaccccagaagggaaggaagccagggttgaagatcaaatggggggttattgatctgatggaggtctctggcctcatacaaccctcttcccacagacaacatgcaggccatctatgtggccttgggggaggcagtagagctgccatgtccctcaccatctactctacatggggacgaacacctgtcatggttctgcagccctgcagcaggctccttcaccaccctggtagcccaagtccaagtgggcaggccagccccagaccctggaaaaccaggaagggaatccaggctcagactgctggggaactattctttgtggttggagggatccaaagaggaagatgccgggcggtactggtgcgctgtgctaggtcagcaccacaactaccagaactggagggtgtacgacgtcttggtgctcaaaggtgagtgggggcatgcagaccaggggctactgtggcccaggaagtccaggtgaagaactgaggaatccctctctcccctacaggatcccagttatctgcaagggctgcagatggatccccctgcaatgtcctcctgtgctctgtggtccccagcagacgcatggactctgtgacctggcaggaagggaagggtcccgtgaggggccgtgttcagtccttctggggcagtgaggctgccctgctcttggtgtgtcctggggaggggctttctgagcccaggagccgaagaccaagaatcatccgctgcctcatgactcacaacaaaggggtcagctttagcctggcaggtaaactgaggaaggagacggaaagggatgttctttcacttcagcctcccaagtagctggaattacaggcgcccgccaccatgcctggataattttttgtacttttagtagagacgagatttcaccattttggccaggctggtatcaacctcctgacttctagtgatctgcctgcctcagtctcccaaagtgctgggattataggcatgagccaccgcacctttaaattttttgtagagacaggatcttgctatgttgcccagtctggtctcaaactactggcctcaaatgatcctcctatcttggtctcccaaagtgctggggttacaggcatgagccatcacatctggctattttttcttgaaagaaagggtgaattactataaagggtgtgaggggaaagtgtggttatggctggtggtctgctctgtagttggttgcccatgcgtgagcagggggcattgccattctctactttttattttattttattttattttattattattaggccaggcatggtagctcaatcctgtaatcccagcactttgggaggccgaagcaggcggatcacttgaggttgggagttcaagaccagcctgactaacatggagaaattctgtctctactaaaaatacaaaattagccgggtatggtggcacatgcctctaaccccagctactcgggaggctgaggcaggagaatcacttgaacctgggaggtggagggcgcagtgagccaagatcacgccattgcactccagcctgggcaacaagagcgaagctctatctcaaaaaaaaaattgtatttttagtagagacggggtttcaccatgttggccaggatggccttgatctcttgacctcatgatctgcctgcctcagtctcccaaagtgttaggattataggtgtgagccaccacgcctggcctttttttttttttttttttttttttttgggatggagacttgttctgttggccaggctggaatgcagtggcacgatcttggctcactgcaacctctgcctcttgggttcaagctattctcccatctcagcctcctgagtagctggactacaggtgcctgccaccacgcctggctaacttttgtgtgtgtgtgtgtgtgtttttttgttttttttttgagacagagtctctctctgtcgccaggctggagtgcagtggcgcaatcccggctcactgcaacctctgactccctggttcaagtgattctcctgcctcagcctctcgagtagctaggattacaggcatatgccaccacgtccagctaatttttgtatttttagtggagccggggtttcaccatgttggccaggatagtctcaatctcctgacctcgtgatctgcccgccttggtctcccaaagtgctgggattacaggtgtgagccacagcgcccggcctcttttttgtgtttttagtagagatggggtttcaccatgttggtcaggctggtctcgacctcctgacctcaggtgatccacccacctcggcctcccaaagtgctgggattacaggtgtgaaccactgcgcctggcctcaatttttatactttcagtagagatgaggtttcatcatgttgaccaggctggtcttgaactcctgacctcaagtggtctgctcgccttggcctcctaatgtgctggaattacaggcatgagccactgtgcctggccgccattctctatgggtcagggtgagaggcctggaaaggggcagagtagggtggaggatattgtgggcagggaagcttacaaagtcttctgttggaagagcccaccagactgtggaggggaagcctctctttggggcacagggacagggcccctcactacctccctcccatccctctggtctggcccttactacagcctccatcgatgcttctcctgccctctgtgccccttccacgggctgggacatgccttggattctgatgctgctgctcacaatgggccagggagttgtcatcctggccctcagcatcgtgctctggaggcagagggtccgtggggctccaggcagaggtgagtccctccctccccggggaaagaagagggcacatgggtgggaggcaaagggctaggctcacaccctgcctctgtaccccacctcctctaggggagggggcgaggaacacggctctaagttgtctgctgacttctcttctgtatccctgatggctccttctccccagatgcctcgattcctcagttcaaacccgaaatccaggtctatgagaacatccatttggcccgtcttgggtgaggaacagctagggaacagaggcttaaatcctggaggggactggggatggagaggaaacacgggttgggttggggatgggccctcgttcctgaggatgtgaaaagtagaggtatccttaatctgtctctctggaaaaccccacagcccacctgcccacaagcccaggtgattttggtgacatctgctgggaagtgtgacctgctgtctcgctggccatctggcacctggaagattcctcgacaaccttagcaaggggggcgggactgagagttcgacttcaccatccagctggcctccagcagccaccaagctgtgtatggggaggggtgggggactgaaggaaaggaggagcattattctgtgatgtaacctacaaaaaggtttggtctcctgtcttgtagcagcagtggagggatggccctgagcccatagtactgtggggttgaggggagcctgaggttgctggtgggggcaaggaggatgggtgtgcacagggaggagacaggaatctggagacttgagcaatggtggggaatccattgcagtggagctgaaggacaaatggggaaaacgggggaagagagagaagggaagagactcaagtcagagaaagtggaaagagatggacagagggagaaaaatagaagcacaaagtgggaggatggagggacagagaaaatggaaagcctcaacccatctctaaattaagccagacccccactaccccatgtctcatcctcacaaagaagagagggaacaggcatatttaatcaaccccagacttcctcacatgcaaggggagggaactgagtcaggatagagatgcctgtgctcagctcccacccggggccccctccttatccttccttatcctaggcacacactcttccctgtggcgccttaccggggcattcagagcatgtgagcagctatcgccactctggcacttccttcctgctgccctgaggtcacaccctatttctcgggggcagagggagtgtctactcaggctggcaggcccagtgggggtatgttatttattgggccggggccatgctgggatgtctgtgaaccatgggcgagtctgggctggtgaagcgagggagggtattgatgctcccaacttggccattccctagtctcaggcagaaatgagctgagctccagccacaccctcacaagcagctccactgggtgcccttttgtgtctctgctcaagcttgggccttactggaaaaaagctttctcagaagtctcacctaaagccttcaggctgcaggggcttaaactaagccattggcaagaaaaaggacgaaaatgacacagatggagaatgaggggagtgccgtggtccaggttccagctccagcccaacccaccaagcagctacagtttgctcttagagcacacacacacagacacacacacacacacacacacacacacacacacacacactgcagtatctgcagtattactggactcctagatagaccttttattaaaggtactcttcatagtcccccaagccctccatcctgagttcccgacctaccacattagtctttcctagcaagactctcctccttaccatacctgatgctcctttgatccccttgcctgagatccacagtgtcatcaaaatgcctgccttgccagtgacctgggctgacacggggcatcagcaatgggcatctagaaaagacaaaagacgcagaataggtgttctttatgaggttggactctgggcaggtgcctccccaggccttgtgaggggtctgtgaggggtctgctgagagatctggggtctctgtacaaaattaggttctcgggcatgtctcaaagtgtctgtgcaggtgtttccagggccgcagtgatggcggggggtatcctgggttgggggctgcagatccacggaagctagtggaggaggtgtcctctcccagcgaagctggccacaaagaggggcagggaggcgaggaggctggtgagctgctgtggggaagcggctatgttgcacaggtcctgctcgcagcagtggtgccacagagtgtaggagtgcagccagtaggtggcatagcctggcagagggcactgggcccttgagaggcagctttttcactcagtgatctcactctggtctgtgggatgaaagaggcatgctgaggcgggggccacaggaaaggccggatggatggaggtagggagcctcctggagaagggccattggaccagagtcctacctgaagtgccaatactgatgccacaagcttcatcgtcccgacactcggtgggaacagggtggcagggtttggtgaagccacagatgtagcagcggagccttccccgggcaggggacatggtgagacctgttgaggcagcagagattaggagagcaggagaggcaaaccctccctgtggggcaggcagaggccagatccggagagggatcacagagagaggtgacacatgaagcagagagaggaaagctgtggaataagggaggaaagctgacagaagtagaaaaaatagctgggcgcagtggctcacgcctgtaatcccagcacgttgggaggccgaggcgggctgatcatgaggtcagaagattgagaccatcctggctaacacagtgaaaccccgtctctactaaaaatacaaaaaattagccgggcatggtggcacatgcctctagtcccagctacttgggaggctgaggcaggagaatctcttgaatctgggtggctgaggttgcagtgagccgagatcatgccactgcactccagcctgggtgacagaacgagactctgtctcaaaaaaaaagagggagacgatgcaggaaaagaaacagagatggaggcaagaggggtacagggattgagagatgcgcagacatgaacagaagccacaagaatcagagaccaacataaaaagagtgagacaaaaagccagacccagcagcaggaaagttgagggggtcagtgaaaaagttaagtaaatggcaccagagacagataggaaaatagaaattgacattgaccaaagggcccagcacagaagcaacacgtgaaataagggataggggagacaggggcggatcaaagatgcagcaagggggagacagttattctcaaatgccttgaaaggaaactcttcctttcccacctcatcaggctggccttcccagtggctggtctccctgaagtcccccactcccccagctctcttcttggcctcttccagcacccacacccctctcctccccagccctcaggttcctccacatgcccttgtccccacccccagccccctgaccactgaaggttccccagcccacccttacccagtgccccacagaggaacagcacgcagaggaagatgctggaggtgcccatggccagacacaggctcaggaatctgggagaggtgatctgcaccccgagatcccgggatttgtagagttggagcatttgagcaagacagtgaggaaccagtaaacaaacacacctagggagtgaatctggggggcggaaccatgaccagattcaccagcctgacccagcaggcagcgggggcccccagcctgcccctgcaaggagtctgcccttgcctggagggtctcctctgctctctcagcatgttgtctctgtaacttagcttcctctcctgctcctgagttgtgtctgtcgccttccctcctactcctccccctccctccccatgtctcaagctgctccctggctctctcagcttctctctgtctttgttttctctgtctttccccctcagtgctttcatgtctctcaaagtcaccctcctaaacagccccggcgtggatctgtttgagtgtagaatcaacaatacccccacccacacacccacatgcacacacaaagcccagctgtgtaagggcggaccccacccagcttcagatccctttgatccccccaagcttcaacattcctaccctgtaattatccctgccagctttactaccttggaggaaagaaataaccacgggtggggctggagggcctgctgatgtgcttgcactggggagaaatcactagaaaggaaggcatggatgggatttggggtaggggggtggtgatacagcctggaaggctggggttgaagagactgggaaggaggaaggcccatctggggaatcagagccagcatgtaccaggaggagtaagactaggaacagggagtgaagataggggagacacaggtgcccaggagagcagctcttttcaaaaatattgatctcaggacctctttacacttttcaaagttacttaagactctgaagagcttttctttatgaggttatatcaatatttactacattaaaaattaaaacagaaaatttaaagtaggtatttattgatttatttaaacaataaaaataataaagtattacatgctaacaaaatacagttttgtgaaaaataactattatttctccacagcacagtgagaagctgagcattgctttacatttttgtgaatctagtgtcaggcttcgtgggagatgcctgggttttcctatctgcttctgcattcagtctgttgggatatgttgttttcgttgaagtccagtatatgaagaaaatctgaccttacacagatagttgcaaaaggaggaccctcaaggaccctgtgaaagggtatcagggatcctcaggggttcttgttggtccacagactgctgctgaggataaaggagtttgaggactccagaggatgctgagagcatgctgtggggcccctccctgtccccactggggcccttggtgcctgctgggggagactctttcttccttttttatagccctataaagctcaaggcacgggggatataaggcaggcagagccgggctggggaggggggtgggcaggaggtagaggcggtcctgacacgggcagactgcgatgaaaccccagtttgttgggatcttgctcagctccctgctaggggctgccttgggtaaggaggcggccagctagcttctcacacaggccttctgccagccggctccaccgagggcccaggtccagcgcctcttttctcctgccaggaaaccgaatgcggtgctacaactgtggtggaagccccagcagttcttgcaaagaggccgtgaccacctgtggcgagggcagaccccagccaggcctggaacagatcaagctacctggaaaccgtgagtcctcagtttctccctcttccagcagcctttccctgcctccagccccatgtcaatccttctggcttccagaaccctccaggctcagtctggctctgggcagatggtgcagctgttagaggagagcagtctgtaccccttctggctcctggcacggagcccctgagaggcccacagtccttgtgcccccacttccccacctccttattctcctaaaagaatctcataggcccattagctcacaaatgaagagctctggccctgaaaggccaaagttaaaaccaaacttcaaattttcggcattagttaaggaccagggaggggtgtgtgtgtgtgtgtgtgtgtgtgtgtgtgtgtgtacatgtttttaatattttattttaacataattttggattgacagaaaagttgcagaaatactcaacttctcctaatgctaacatcttacataaccatagcacaattatcaaaatcacaaaataactgatacaatactactaactaatctacagactttatttgatttagcaagatcctacattgcatttagctctcatgtcttcttagtctcctctgatctgtgccagttctgtttttctttgtctttcatgaccctgacacatttgaagagccctgataaattattttatacctggagtttaaaaaattacttttagggccagtgcagtcactcgcacctgtaatcccagcactttaggaggccaaggtgggaggaccacttgagcccaagagttgagaccagcctgggcaacatagggagaccctgtctctacaaaaaacaaacaaacaaacaaacaaacagattaaaaaattagttgggtgtggtggcacatgcttgtagtcctagctactcagggggctgaagagggaggatcgcttgagcctgggagattgaagctacaatgagccatgatcacgccactacactccagcctggggaacaaaatgagaccctgtctcaaaaataataataataataatttttaggctaggcttggtggcacacacttgtaatcccagcactttgggaggccaaggctgaagagtcacctgaggtcaggagtttgacaccagcctgggcagcaaagtgagacccccatctctacaaaaaatgtttttaaaaaattagccaggcatagtggcacacacctgtaatctcagtttcctgagaggctgaggcaggaggattacttgagcccaggagtttgaggctatagggaggtatgattgcaccaccacactccagcctgagtgagagagcaagatcttttctctaaaattaaataaaatcatttttagattaaacaaaaattacgtgccggatgcagtggctcacgcctgtaatcccagcactttgggaggccaaggcgggtggataacctgaggtcgggagttcaagaccagcctgatcaatgtggagaaatctcgtctctactaaaaatacaaaattagccgggtgtagtggtgcccgcctgtaataccagctactcgggaacctgaggcaggagaattgcttgaacccaagaggtggaggtcgcggtgagccgagatcacaccattgcactccagctgggcaataagagtgaaactccgtctcaaaaaaaaaaaaaaaattacagatacttgaaatactaaaaattattttatagaatgtccctcgatatttatttatctgatatttgccatgatgagattgaggtcatgcattttaagcaagaatactgcagaagtgatgttgcatccttcttgctgcatcacatcaggagtttacaaggtcaatgcattaactttgatcacttggtttcagggaggtgttttttgagggggctgaaaatccctttgggctccttgaaatcacatctgctctgccccagaaggcaagtcctgaagccaggagtccaacaccccagtttcattctctctctcagccccagtgaccttgattcaccaacatccagcctgcgtcgcagcccatcattgcaatcaagtggagacagagtcggtgggagacgtgacttatccagcccacagggactgctacctgggagacctgtgcaacagcgccgtggcaagccatgtggcccctgcaggcattttggctgcagcagctaccgccctgacctgtctcttgccaggactgtggagcggatagggggagtaggagtagagaagggaacaagggagcaagggaacaagggacatctgaacatctaatgtgagaagacaaacatccttctgtgagtcattaaaatctatgaaccactctacagctgactggaaaattacatctatctttggttgatgggagggctaaaagcgtaatatggggcatccaggttctagtttgggggttaccaagcaacagcgggcttaattacagtggtgcactccttaaccaactaaaccccaaagggcaatggcttatctgccttctgtggctcctggatcctgttgctgggttgaatcttccttagcaatgagattcattgagtggggttgccagggttttgtgagcatgagtctgggtttgctcccctatttcccatttgcaagttggctcccaataggactattttgaattgagaaaagaaatgtaaaaactgtgataggtaaaaactgcttgatgccctacttactaactaggctaggtgaggcctttgactctaacctgagagaaactgaagaaacagggtctcaggccccatctccatgtacctctcctatcctttctggagagccctcaagccaggccgcaccttcttcttggcaatacatcaggggtgtggcctaaatttaggatatgagttgttgtgtgccacctggagacactggaagggaggatgaagacctgaaaaacctgtttctccattttccccagcccagcctcccagggaacctccctgaaggattcctgtgtaagggagggagattgagagtattatttcctgggaggtgacctgacccttaggtcttcttataataaatgtacattttatcagactcagacatttattactcaaaatggaaagaggtgagtatgggggatggggtacatatgggagcctggatttggggagtcagctctgtacagtgaggtcatcaggtccttgtgggagccttcactggggacaacacagaagccccatttcaggcccagatcccaatccctcctcaagtaggggacagcagagtataggaagcaaagtggggagcccttctaggagccaatggaggtcctggaaggaagtgggaagggacccagaaaaaggagagtgaagggtgtgaggtgggaaggatggatgaggagaccactcggaacagtgtttaattaaagaaatgggagctagggagagacgattctgtaaagccaggggatacagagacacagggagagaggctcaggccaaggcaggtgggaggaggggcagccaatggaatgagtctcagtgcagcagccagaggccaaggccagccaaggaggtaaggaagacaaggcccagggctggagtgggccggggtcctgcgctgttgcagttgtccttgttgcagcaggtggtgttatatgtcagacccagcttacggttggtttggttgaaggcctcctgacagggctcttctggtgtgccacagcgcagattggagaaaacccacatcttacctaggggtgggaatgggcagggaatcggccaggatgggcacctggcatgcctgtgtccacctccccaccccatccacccacctaggcttccttccttcccaactctgtccctggccctccccttctcttttcttagtctgatcttccttctgcacatccttacccaccactcccccagtcctggttctatcacttgctggccatggacctgttactgtctctgttttttgtttttttgttttttccaagacagagtctcactctcgcccaggctggagtgcagtggtgccatctcagctcactgcaacctccgcctcccaggttcaagcgattctcctgcctcagcctcccgagtagctgggattacaggcgcccactaccatgcctggctaatttttgtatatttagtagaaatggggtttcaccatgttggccaggctggtcttgaactcctgacctcaagtgatccaaccaccttggcctcccaaagtgctgggattacaggcatgagccaccatgcccggctgtgttactgtctctttttgaggccgttttctcagtataataatagcacccacatcacagggttgtcatgaacattaattgaaaaaaaggcatgcaaagacataggatgttgcctggcacacaaccatctttggccaaatattatcattgctataatcctctgcttctccatctcagtcttagacccatttgggcctcagtcctggtcatagaggctcccacctccctgttcaccccactaaggaaggggatgttaccaaggtatgcatgtgttgtcaggcattgctgtcctggctccaggcggcaggactgccggtccacacagcccagcacagggaccttgtagcaggagtgacagcgaatgtcagctgggaagacacaagtcaggctgaggtgatggggtctctgacttacctggggataagctgagctgggggcaggggtggagggtggagaagagcccatcccgtaggtgctccaacctgtttggctgtttggtctagcaagcacagagcaggtgagtgatgcagggaaaatggaaagtgggcggcaggtaagggtagagctgttgctttgtgaaaggcccatgccctacatatcttccgtcactccaccccgtttggaggtgagtcaagagggacagaactatgaagaaaaacatggggctggagatagatggaatgtgaggaagataccatggggaaagaatgtggatggtgaaggaggagatggaaacttgaaagaaggagaaataataaaaatgaaaatcatgagggttacaacactgtcagaaatgccttggaacttgaggctggcgagaaagccatctgtggccagctttagcaatttacaatttactcttcacctcctggagctggcaagagtgtggcaagaggaaccagacctgaatagaatcctctcaccccagtagctcttcagcagaaaggaatgatacctgagagacagatcaccagattccatcttagcaccttatcaaaatggagagggtggatacagaaggtggcaccccaagtttcctgcttcagttaattcaaggtttgggcaggcaagatttggtgacgcagggtccgagggtggaagagcctggtaagtgtacctcagtgaaatccacttcaccctggaggtaagtggcccagttgtcccctcttcagaaggctcaagaaaacgctctgtttccatggaggctcttagatgtcactgcaaccatctagaaagtttgtatcccctgtatgggaggaggtatgcaacccaggaggggagtagggggtatctaggaaaggccatggctgagagactgaacatgtgagtccctgatggagtagatggggagggtaggttacaaaaggagcctggggctggatgcctaggtcttcgagaggacaccttactgagcacagcagatagaggagaaggcaggtaagctagactctggagagttgcatattgaagtggggctggttggggaactggataccagagtttccaaggaggagacaccttggagtggggaacaggggacccagagccctggcaggtgagagaaatgggtctttcttggaggtggggaggatggatggagacctggctttttgagaaatagagcaaggaggctgtcatagggaagcctggtcttggtggcacaggagagctgagccagttggggctgggggtgttgggatcccgagtggtgggtagggccgggaagtgggtagagcagggtgtaaaggtcctgaccaggcaaaccaggtctttggggcccccaggtgctcacctgagacccagcagagcagaacagacagggtgagcagcataagggctttcatggcgagggtcctgagaatggtggcaaccacagcagctgatagagtagattttcaaggatccagctctaggagttgagtggcctttttggaatttataaacccaaaggctcctcccttccctgcctctggtagcccctcccttctcacttactacgcagctgaccagagaaaagacaaggggtgggaaggcactgagcaggactgagtggggagtagggatgggagagagggatgggggaaggcaggtgccactagtggccaatgccattgtggttcttggtttcaggccaagatgcccttcctggtccccagctaagagtcctgctgctcagtcctctgaatgagcatcatcaaaggcctctgtgatttacagtgtccatggtggcagcttctgctggttcctggaaaatggacaaaaggatgtggcccaaattaattgctgaatttgggtccctgggtccctgctgggcattgataggggcatgctggtggaaattgggggaggaatgggtcaaattaatctccattcagcccccactcggtctttccaatacctgctcagcaataagtgactcactgatggcttctgtgatgccacagcagcagaggcaggggctggggctactcatccaggagagccaccacaggtctgctaagtagggctgcctcaggctcccatgaaggttctcaggatgtcacccgtgctccacttgcgcttggtgtggccttgttgctccagtccagcagcagcaattgtcctaggtgtggctgtgtgcacctgctccaaagcacctccccagtcaaaacctgccaacttgggcagggtaccaagccaggaggaacagcatgggcacagagaggtgaggtagaagctaaaataagaatagaaatagtaggccgggtgtggtggctcacacctgtaatctcagcactttgggaggccgaggtgggtggatcacaaggtcaagagatcgagaccatcctggccaacatggtgaaaccccatctctactgaaaatacaaaaattaggtgtggtggcatgcacctgtagttccagctactcaggaggctgagacaggagactcacttgaatccaggagccggaggctgcagtgagtcgagattgcactccagcctggccacagagcaagactctgactcaaaaaaaaaaaaaaaaaaaaagaatagaaatagtaataataatggcaagcacttacatagtgatcctatgtattctaagcagtttacatgtattactttatttcgttatcacaatcccctacaaaacaggagtttttgttgttgttgtttttgagacagggtctggctggctctgtcgcccaggctggagtgcaatggcctgatcacagttcactgcaacctcgacctcctgagctcaagcgatcctccctcctcagcctcctaagtagctgggattacaggcgcacctgaaaagttaagcaggccaaagcatttgtgtaaatggcccgagcacacattttaagtgagaaccatttgaagactccgagtttgcctgcgaggattcccaaagggatctgggcagctggtggccccgccccctctcttatcggagccccccagcccctccgttctccccacgcctaacttccctccggtccccccccaaccggccccacgccgctgattcgctcgcagcttctcctcaccacatcctaaccatggctgtgtttctgcagctgctaccgctgctgctctcgagggcccaagggaaccctgggggtaagcgatccctgggagagttgtgatagacgcagaggggctgaagcaagataagggccgcctagtagggtgggttgtgtgtgggaagatccaggatggctggagtgcagaacagagaagagaaagaggagacgggatggagggtcgtcttgccctgtggacgtgccctaaccacagcctccggcctctcctagcttctctggacggccgccctggggaccgggtgaatctctcctgcggaggagtctctcatcccatccgctgggtctgggcacccagcttcccggcctgcaagggcctgtccaaaggacgccgaccgatcctgtgggcctcttcgagcgggacccccaccgtgcctcccctccagcctttcgtcggccgcctacgctccctggactctggtatccggcggctggagctcctcttgagcgcgggagactcgggcacttttttctgcaagggccgccacgaggacgagagccgtacagtgcttcacgtgctgggggacaggacctattgcaaggcccccgggcctacccatggtaggtgcaggcctgtgcgcacaagggtacttaactccgacacatacccggaggagggaagagggccttggctgggggttcttgagcgggactgctggctgtccctcgtcaaacccctgacctcagcatccctccccgccacgcctttcccccagggtccgtgtatccccagctcctgatcccgctgctgggcgctgggttggtgctcggactgggagctttgggcctggtctggtggctgcacaggtgagcaggagggacccggcctcgttaaatggggagtgaccagaggtggaaggggcaggaccagaaccttcgcaaaagaaagagctagacctagagctctggtcctggcttggcgaagaatgggagaggtcaaaggtgggagcgaggccgctggctggtgagtagagccccaccagagcagatgagctggaagtgcagcagagttagagcctgggctggactgtcggtggggtagagtctaagttgtttccggtctgagccttcaagttgctgggctgtccttggcgtggcgagtcccaggagaaccagtgagacaagactggtggttctcaaagactcatatgtcccttacaggcgcctgcccccgcaaccgattcgaccactccctagatttggtgagactaattccaccccattttctttctcctacatgcccactccccacccctcaattcctgagtctgagcccttgctgggagcagacacgttggtcaccttctctccatccttcagctctgtcccccccacatagctccacttgtgaaaaccgagccccagaggccagtaaaggaggaagagcccaagattccaggggacctggaccaggaaccggtaagggcatggggatgggaaggggatagccagaatctctgaggaaaatggaccaaaaaaaaaaaggcctgaaccccaaggaagactgtggagaccatcttgtcttcctccccttcctcctccagagcctgctctatgcggatctggaccatctagccctcagcaggccccgccggctgtccacagcggaccctgctgatgcctccaccatctatgcagttgtagtttgaagggaagcccttactccaaacctcccaagctaggggatcccagctccccataatccctctcccctccttggttcctcacctggaagaggaaggcaccatggtatagaaataagtgctagactgggagttgggagacctgggttccaggctgtctctgccactggtcttacttctaaacttactcccatctctcctataacctccatgtctccctcaccaccagtgtcctctctatacccaatcaagccctagctccttttttttttttttttgagacggagtctcgctctgttgcccaggctggagtgcagtgacaccatctccctcactgcaagctccgcctgccgggttcacaccattctcctgcctcaggctcctgagtagctgggactacaggcgcccgccaccacgcccagctaattttttgtatttttagtagagacggggtttcactgtgttagccaggatggtcttgatctgctaacctcgtgatccacccgccccggcctcccaaagtgctaggattacaggtgtgagccaccgcgcccggcctgattctttaagctgtttttctttgttgctggtgttttctttttggactcctcttccttgctccatatccctacagtatttcccaccattctaggtttgtccctttctcttcttctgggacactctcatcaacagtcagtcctcagccccctcctctgcaaatgacactcagaactctctctggctcagatctcagatttgggattaacaaacttccacttagacattctgcctgactgacctcaggcatttcgcactctgaatgtcaaacccaactcattgtcatctctgaagctgctcacttaattctcctctgtattctctttaacaacccagttgcccaacccagaaactgggagtcacgcagacctcctttctctcttactcccacacaatgagccatgaagtccagtctttctatcttaacatcactgtcaaacccacactgtattccatgcccagcgctgccacgtgaatgtactctgctcacttccttcctggattacccatagccccacctcatcctcctacccttgctttcctccctgaagtcagagagatcctactcaagagataactgctcctgacagcccttattacagaactgaagtactctccttagcttcagctctgtgcccacgtgccttggctttggatacaaggtactacagcactttgtccactctccaggcttacctgtgtcattccacatgcacatcttagaaaatgccagccttagagaattctccctagccccaaaatgtctttgcccagtgcaattccttcttcctgtattacccctttccctccttcacactatctgcctggctaattcttatttatccttagttcaagtatggccttttctgggaaggtgaccctccttggccaccccttgcatatactttgatgccctagggcacaccccctttatttccctcatagaaacagccttctgtaaattgttccatgacaacctgtatttcaatttgtaagaaatttgcatgtactgtgagctccccaacgtcaggagactgacccttttgatatcattgctaagcctcattaaatgaatgaatgaaaatgaatgtccctggaagtgtcatttctttttctttatcaaataggggtggactggtaatctaccagtctctgaatcatctaacatttagataaattcagtgagcaatccacccatacactcttttctctgccctggacacacttcccatgatagaaattctgtcttgttcatcttgtgctcaagtacctatgacatggttgggcaatgagttgataagtacctaacaagatttttgaataagaggccttcttccctgcactgaccccaaactcaggtttcagccctgccctatccctttgccccagtaagacaccagtcacagcccagtctaaaaggtcaattctattttattggttctgagagggaggattcacccagtggatccttttccctacactctcccctcccccaatattgaggctctctcccaactactgcctattcagcattctctatctaaccctccttccccttctacttcctatactatcctacccctggccagcagtaccccaaggccaggccctcagctgtgggggcgtgtgctgagcaccaagcagagggagctgagcccggcgccagccttctccagttctgagcaggacacaggtaccagggtgacatcagagagcttctgcagtgcctgcacagggaagacatggagtggggagaggggagtgagacctcaggctgagccaggccactcttccagccagctcagagtggccccacccaggcttctagagaaggtacccttccttcctcccactaggaaagcctgaaactcttttctctgatggtgcttggtgttggagttcctgccctctctcacctcctggctgttgggcagatccccacctccacggtgcaggaggaaagggggcacaccaggcaacccaggacgaagaaagagacagtcagcagctgcgtcatctgggagggtcagggaggcatatgggtgatctgtcagcactgccattgcctagaggaaagaggaagtgttcgagtctcagaacctctccacagctgtgtctgcctgctcaaccaccactaagggctggggacggactgacatttgtggaaaataatgacagcaagcacatagagcttacgatatgtcagacactaagtactttagttacctttgctaatttccaccttggaatcacatgcagttattttcaaccccctaccttccccagcccctcctatctgtcctacccatccttagagtcacagtttaggtgccacctttggggtttcctgaaactccggaagagcaaattaatcacccctgttcccagtcctgctgttgtaacttcttattttctcctgtgttctttcatgtaagatggacagcccattgagggcaggggttagggctaatttcctaagcctcccagctcccggcctcccgggcccagaactgcgcccactttcgttggccccgccccctcctcacccggacagccttttgggcagcgtcgctgctgcctgccacaacagtgcgaggtccccccatgccgcagagaccgcgcaggtgggagggacccgagactggcacagtggagacggcgaagtcctagggagagcgaagggaggtattcaggggcgcgggaggggtgatggggtatcttcaaacataggctgctctctgcctctcatttcctcagcgggcgcccaggcccttccgacccccacctgcaccccctccctccctaggctggtcccgctccgcacccggaacgtgtccgccacgatctcagctcctcggtgattggtccatttggagaggcctacgaaaaactcccggcctgagtccgggaggccgcggaggtttgagggcgggagtgagttagaaacaaggctccagacggccgagtctcccaaactctacttccctgtgccaagacctatgcctccccccagcctcaccggtgaagagaacgtcagtgccatccagcgtcgcgttctcgtctcctatttccacaattcggagccccaggtcttgcagggctttgcggactccatcgaccttaggataggagaagagggcacggagctgtgacacccccatcctcaattcttccccaaagccccgacatccagttccttctgcctttccccataccacacccgcgccacggcgctcacctctggcctacgagcggggctccagggccgcgtgattagggccgtgtccccttggatcacggccgtgtcgccaagcagcggtcccagcggcaatgactcctcaggtggcagttctagcagctgtagccccagtcgttgcctcagtttacctcccagcaccccgtgctccctttgagctttggccagatccagagcgggaaggccagcccccgcaccttcccccgacgccaggctctctgggactccccggatcagggcatgggagcagcggcccagcccctcccccggcgtccccatcccatccacacagactccccctccaaccgctcggatttcttagttttcttgtttcttcacctgtctgggagaagaaacagaaaaggaggagacagagaaaaagacatgcagacaagggcgttgggggtggttaagagcgcccaggtcttcctcctgccatctctaggcgtccctcccactccgccccacccactccagaccttccgctcctgtcgacctcactctacccagcaccctcaggggtcagattctttaagaggagcctgaggaacaaggctagggtctctaatctccaaaacacctgttgcccctgcttgggggcttgtgaggtccctgtcgggcgcccctcttggcagccactaggatgcgctcactccccaaaaatgcagcagccccgcccccttaaccctcagctgctcgctaccgcagggactggaagtccagcccgggacccgcaggggttatgggacagaaggagaaagctggagaggcaggggctggggaatggaagtcctgaatacccgaacgagaagggagagaggtgggtaggaagggaggagttcgagcctaaggagttaagcatcctctctccgccctggctggtcacgctgcccctagcacgacctagtataaaccagaccgagtcccgaaggactgggagaggtctaaaacgaaatgcgaggggcggggtaacagggggcgtggttccggggcgctggcactactcccggctccaggacccggttccccgtctatgtcccaaagtccaccccgcctagctccgcgcccaaataccggctccccatactctctgtctggtgcaggcatgggcccggcacccccaaactccggcccccacacggttcagggccccccacgcaagactcacctccagcggccacccccactcctgtcgcgctgtgatctcggctggggccccaccccccgaggacagagttggtggagaagggagtccccgtcttcaagcctcggggactgggagctctggcttttagcgggggtccttgtgtaggcgagctcatatactacgatggggcaggggcgcgacggtctggcggctccggggcattgtctaagcgggacggggcggggcttcttcgggccacgcccattccgccctgctaagccgcgcccattacatccagactgcgccccccttgccagaaatcggcaccgcccagcgagcgctgcccaggcccacccagatctggccggccctggcgacggggctgcaaacgcttcgtagacctcagaacagcgcaacggcggaccggcggaccggcacgaaacatagcagccccaccacaaacatttcccttcttaattcctggcttctgccctgagctcaagatcactgacccacccctcattccatgtcgcccacactttaaacccccattgcgtaaaaacacttgatttttattctgtattttattactgaaatatgttgtcctactcatcccaccccacaataaaaatctgacccaggccccccatttctttccctcatcccctcttccaccacaccatcccggaacaagtgctccaggattccctgcccactggccattttggagtgtgtccattgggtagcaatgtggaaaccaccagggcctttgtggagaaaatggagggggttgagggagtcccaggaggggcttatttgagggcctttgccacttgctcataggcgagctcgatctcctcatcatctggacaggtggaagcgaattcttcccgggcgtaggcattgctcaagtaccgatgcactccccggaaggcctcggggatggtgaatccccggtacttcttacacaccacctgaggatggggagaggagagggaccaacatgttagacccagggaagccaccttggctttcccttctccccaggccgacatgataaaaccagctcaactcctcactgtcttgtactgtcgttagccttccttctcacttactgaaatcctggcttttaataaccagccatttttcctgagtttttaaaacttgagatataatttacttataaaattctcctcttgaatttccacagtgactttttccccctataccacttcaggcactgacacaggtgacttttgtctctatatttttcatcagacttttttttttttgagatggagtcttgctgtcacccaggctggagtgcaatggcgcgatcttggctcactgcaacctccgcctcccgggttcaagtgattctcctgcctcagcctcccaaatagctgtgattacaggtgcccaccaccatgtgcggctaatttttgtaattttagtagagatggggtttcaccatgttggccaggctggtctcgaactcctaacctcaggtggtccaccagccttggccgcccaaagtgttgggattataggcgtgagccaccacgcccggcccatctgacttttcatcatatattcttaactttcatgtgaatattttattgtctcagatttcaaccctttgagagcaaggcccagtcaccatacacttgtgtatctttcaatgcttagtacacagatgttcactacatagttgtgtggcagactgatgtcaggcccatgttgcacaaactaaaccatagctttgagactatgacaaaaacatgggaaccagcagttttgatcttccacaagaggaagtgaagactgaagttataaagaaagttaaagctttgactttaggaaaagcctgctctgtctaatctgggaatttggcagtgataccgagacaggaagagcattcttcaaaagtaatactgggatgtattcctctttgctagtctgtttgcacccatgacttacatcatggaatataattatctcaagcagtggtcttgttagcaatgactgctgcaaaggactggggtggggtctgccattggtagcaatttatgaaaaccaccctaagaaagaaatcgtctttagagtggttgtcaggggaagcccatgtgggagctccttaaagggccactccagtggtcatcctctcctcccgcaataaccacacacctgtactatgtgtaactttggcaacaggttgcagtcagccagggtgagctcgttgccatccaaaaacttcctctgagagacaccttcatcttcagcactggtttcatccacttcttctgggaggggggatgttaagtaattgtctaaaaccttcagggctttcaggagtcccttctccagatctgtgcaagagagggaactgattagaacttcaggaaaagattgacatagtccgaaaaggcccgttgggggtggatactaatggtgagtccaaaataataatagctaacactcatgtagttacttttctatgtgttattctaagcactttacattttattttatgttagacggagtcttgctccgttgcccaggctggagtgcagtggcatgatcccggctcactgcaacctctgcctcctagattcaaatgattctcctgcctcagcctcctgagtagctgggattacaggtgcctgccaccacaactggctaatttttgtatttttttcagtagagaccagtcatgttggccaggctggtctccaactcctaacctcaggtggtgcgctagcctcggcctcccaaagtgaacactttacattttacaaactcatttatatcgccgggtgcagtggctcactcctgtaatcccagcacttttggaggccgaggcaggtggatcacctgaggtcgggagttcaagaccagcctggccaacatggtgaaaccctgtctctactaaaaatacaaaaattagctgggcgtggtgatgcacgtctgtaatcccagctactcaggaggctgaggcaggagaattgcttgaacccggcaggcagaggttgcagtgagctgattgcaccactgcactccagcctgggcgacagaacgagactccatctcaaaaaaaaagaaaaaaaaaaatttatatcaacccatgaaataggtattgtcatcctaattttgtggatctggaaatggacttacagagaggtgaaatgattgctcaaaattatacggctagttggatttgtactcaggtagtctggatctagagtgatgactgttcttaagcatgaccctattctgccagaaaacaggccagcagccaactaacgtcctcagtggggcagaagaggctagggaacaaatgagaaaagcttaaaagtcttggccaatgaaaatgcagggaaatatagaggtaaagcaaaaatgggaagctgggggaaatttacgaacatctgcttcatctccctgatatctgaacgtccaggtgcccctaatgtctcctacccgctgggtcctctctattcctcccaggacccaggcctctgacccacaagactcactgtcattgagtgctgggtttgaattcttgatgtaggcagaaaatttggcaaatatgtccagcccagctgtgttggactcagggttcagagctgccagcttggggtacctgaaagccaatgggaaaaatgaggtaagatgtcttcctgggaggaacctcagctagctctcctgccccagccccaccaccatctctgttttccatttctgcaaactgtctgtttcccagaatctccctgctccacctctccactttctgagtgcccctatacctgggagggcacagcactgcctccagaaattcctcaatcttgttggtgtctgtgtgcacttcagtgccatacagcaggaatgggagctgcccccctgggcacagcttctgcactgtctcggtccgcctggagaaaggatcaggaatcaggactggaaatgggggtcaggaagaaccagaaagggggaatggaggacgtgggataagaaagggactccagggggagggcaaaaatgttcatgacagaaggactcgggtgggtgtgtgtttgcacacatgtgtacaccaggggtgtttcaaggaacataagcaggcctaccttttggtgtcaacggtggtaacattgaaggtgactcccttgagccacagtaccatgaacagtctctgggagaatgggcagttcccaatcttggccccatcactgccagcctgaaaagtaaccccaacccaaggttatgcctgatgcaccccacccatccctaggccagtccctgcattcccactcccagaccagctgttttctgcctagtcatgacacatacactgtcccctcactatgggctctttgcccttgggcctgggtcaaacctaaggcagatcaatgggaaactgttttgcaaaggcaggcttctggttccccagacactgaggacaggtgggaggtaggtagagggaggaggtcctggagaacttgggaggatctgaatcctagagagggaagggtgtggaacttcagtgaggccagagttgtaggctagaagcctggatttctgggttcctgaagggagtagagtctgaagacaggagaggtgggtggggtttgggagccagagttttggttctctacacctccaatccaaggtgtctttgggtggggagtctagtcaaggggccctgggcctcgcgctagagatgtggagggccctacagagaggggctgccctctaattagcaagtggtgacctcattggcccaagggacacctccccctaagctgagggtgattcatctctctgtctccggcttccttcctgtcaaggatgtgggggaagggacagtgaggatgaggcctgggcagctaaggctacccctaacctgttgccagggtctcccagcacaagtcctctgactgcaataaccatcctctcacaggacacagggccggaatctctgcggcacagcctcacccacgagtaaaaatagccccggaggcgaatgtgagagtgaggtggggaccacacctaagggggcggacccaagcaggctccgacttccctgggcccagggagagggaatggctgcccgagaaacccaagcagaagggagagggagacacaggcagagacacacaaagatgagagaaacaaaaggggggaaggggaaagaaaggcggcaggaaagtggagagtggggagacgtgcgtgccaacggagagacacaaacggagcggggagaagaggacactgttaaggaagggagggaggggcacagccaggaggtcccaagactgggaaatgaatgcagcagcggtagggaggggagcggccgctgcaatcagaggggggctgggtgacaccgagaagcctgctgcctgcagttttgctacccaaatgccataggaccatctctccttacccacacccgcagagagaggagagagttggggcaagtcttctacttctccaacccccaaatcccaaaatgccctaaccgagctcttctcctccgtctgatctctctcccacccatccttgtggtagctacgttaaactcacgtcttcttgccacctccccttctgtccctttccccagtcctggggatattcaatgccacccgatcacctctccagctctgcttttcaaactccgatcccagtctcctgttttgttccgcccctccaaagcttcccaatttacttgctctcactctcaggcctccctcaacacaccgtcttccctgaagcgtctccatccacacacacacacacacacacacacacacacacacacacacacctctcctactgcactactcaccctcagatcttgtagggacacatgtcctaactgaggttcccctctgtcccttctaaaccctgctgggcccccactgtcccttcaccagctcgccctctaaccccaccccagtctcacttttgggaattctcctttttctccacttcccttcctttagtctgctagaaacttgcacttttacaaacttttcagggttgatcctagaattctcattacttgctaacaagttaatgtcttcccctctcaaaaccacccctcaaccaaagagtgcacgtgggattgggggtgggagtcaaggagggaagggattggggagttaaggctggaccgggggaaaggtgagagttggcttccaggaatttgggtggctgaggagagaagtgttcttaccttcacgaacaattcgacctgcggttgttcttcagccatggttgcgtcggggaccaggaagtggccgtccctgggggaactgggaggggctgggaccggggaaggcgggtctcacactcagggactctctcccctagacccagggctgtcccttcagcacaacacaagctcaatcagacctacttgcacccaaactaggcctccccaccagcccaacgcaccccacacccagctcctccagctcggtcctctcccgggctggatcagagagccgctgactcaccgaccggccccgccctgaacctggggaggggactggaggggggcgggactcgacgatgtagggagtgagtccggaaggggaatcctcggatctcccacaggatggggatgggggtgttaaggaggagtcctgaaaacctccttgtttctccgacctctcctgaacacaggactcttttctgcctcagtttccctgcttcattaatctgagtacaacccgactgaccctcatataaaaaacttgacactaacagcttgggcacacccgtgaagattcagggatggggacttcaaatggaaaggtggtcgtttaatcattctgcatttcttccagactccaatccaaattctgggttgctgggactgtggtctgagagaagaactcggaagtggaaggctgggactgcagataggaaccgttagccatgcagcctgggattagggaaggggtgacgccagcactccctgagctgcccagactggtgtctcagtaggtcctgtgccccccgcagtctactgtctccgggcccagctcagcactaggacttgcagtccttgtggcctacacttgggattgggcataggaaatagagttaggggccgggtgaggtggttcacgcctgtaatcccaacactttaggaggccaaggggggtggatcacctgaggtcagggagtcaagaccagactggccaacatggtgaaaccctgtctctactaaaaatacaaaaatttgccaggcggggtggtgggcacctgtaatcccagctacttgggaggctgaggcaggagaatcaattgaacccgggaggtgaaggttgcagtgagctgagatggtgccattgcactccagcctgggcaataagagcgaaactccatctcaaaaaaaaaaaaaaaaagaagaagaagaaaagaaaaagaaagtagagttagggatgggaagggagatgacgaagtcttttgcgaaggaaacataaagccgaggcaaggggctttgttgcagggaggggtctgttcctgtagcttggtcagctttgtgcttccacttatgtttcctattggggccccttcctgtgccctttgtcctcgtctcactgacaggttgccttggagatggggcagaggggtgggattatcatggcccgatcctgaagtatgtgtatagggggtggggtaggggtgttgttagctggtcctgtcatggggataaagaaagatcagacagaatagtgggagtagagtccttggggacacctaaataaataagcagggaggacataggaggagcagctctctctccagtaaccttgatttctattaaacctttatgacctgctgaaaaaataaacccagaattccagcctccatatcctgaatttctctcctgtccaaccatcccttctctatcctcctcatcaccctctgtccaacaaaagacctacagttccagaaaaccatggtggagtgcaagaacacagaactaaaacagagcttgaaacttaaagaaagggagagacttgggggaggagtggggtggagtgacgtgatgtgctgctggaaaccagcagttggtggtttcctcttgtgcttcctcttctgtgggttttctcctgcttgtgggagggcctttttctctcctcccgacagaaaggctatctttggtgttcgttcccttgaactgtaacatcctgtaagggtatgattccatgcctctgtgtgggtgtgaattccctcatggtgaccctcaaaatctgcacacaggaccccttcccattgaggggaggggatcaaaacaactctacttctcagggtcctctcctgttccaactggtctgtgtccaagagaagccttaggtaaatggggccagcttgaagatcaaacaggtttggcagcctctcccggcctctcttttctctcctacagctttatagctacagctgccttgatatcaatattgactttggctggctggcatgactacccacagggtatcgtgccttaatttaccaggtgacaggcaacgctgccctctcctggaaccatccagcagagccagggctgtacccccaaatcctgcaacagaggtttccctccatctcacctccctgtccctgcatttctcctatctcagtagctcctctttccctctctgggcttctctttccactccctccccttcctgggcttggtaaactagtccctaatctcttcacaccccagattggaaggtgggtccctccctgacactccccagagctgtcaccaacctcctccaagtttctatagctccattgctcaacagatttgccaggggtaaccattaacccagcccttaactctgttcccccacctttcttgctggaggggattttccaattactggttagcacagctaggtcatctcacccccaccatctttcctaacttcttgggttggggggctggggaggaatctccccatctcagggtactaggaacaaagctggggaggatggtgcatttaaagggattatatatatatatatatatattttttttctttctccctcataaccccacccccgcaacacacacacacacacacacacacacacacacacacacacacacagacgcacaaataagctttatggagcagtgacttcattatgttcaccgctttgagtccaacccctggcccaaaataggcactaaatagttgccgaatgcatgaatgatagatacctctctgtcttcaggggtgtgtagaagtgcgaaggggtatgggcatgtcccagtaggggtgtgagtgttctgatcagaactacttctctctgccagaatttgatgtaattcgaatgcttccacctctgcttgaagggtttaaataataaattaggccctgtcgtgccattatgggggtggtcataccctgtacccaggaaacaggcacggtagggctgagacagaagtcctgcttgtttccgcttatttatttgaaacaccgctcatttaggtcttactttgtttgccaggcactgttctaagctctgtataaatattaactcagagggtacaaatattaacttaagagttgttgcaggaaaaaaaataagcgcctctggctctttaagtttggcctccccctcaaaacccccgcaacggtcccaaaccccttccagggactgggactacggaccctggtccgaccttctcgcgggcttcccactgcgccaatcaaatcccagaaacagtgagtgctagaggcccggctgctaagcaacggcagagggcgggaagtttgaacgttctggacccgccccgaaggcaaataggccaatcagcgtccagactcttcagctacggcagtccgcttctcctcctcgccctgtcggatctctaggctggatccgggcctctccaatcaacagcggctaggagggcggggcgcgtgcgcgcgcacctcgctcacgcgccggcgcgctccttttgcaggctcgtggcggtcggtcagcggggcgttctcccacctgtagcgactcaggttactgaaaaggcgggaaaacgctgcgatggcggcagctgggggaggaggaagataagcgcgtgaggctggggtcctggcgcgtggttggcagaggcagagacataagacgtgcacgactcgccccacagggccctcagaccccttccttccaaagggtaacctccgcgtgacaggaatgagggtggggcgcgtggagtttcccacaatctgtactttagttaaatacccgagaattcacctcctgtgtccacagctctccacgcccctcagccctgccccgcagccctgtagcagaagtacttagtgctttgcattctgcgcgccaccctaccccggcctcctctgtgaatcgttgcttccgaaccgccctcactttttgcatccgcagagcctccaagctcatggcctccttaggagcgaacccaaggaggacaccgcagggaccgagacctggggcggcctcctccggcttccccagcccggccccagtgccgggccccagggaggccgaggaggaggaagtcgaggaggaggaggagctggccgaggtctctgaggggagtagaaacttgaatggagagttgatgggaagttagaataaaagagggttgggagccgggcgcggtggctcacacctgtaatcttagcactttgggagactgaggcgggcggatcacctgagctcaggagttggagaccagcctgggcaacatggcgaaaccccgtctctactaaaaatataaaaattagccgagcgtggtggcacgtgcctgttatcccagctactgggaaggctgaggcaggagaatcactgtaactcgggaggcggaggttgcaatgagctgagattgctccactgcacttcagcctgggcgacagagcaagactccgtctcaaagaaagaaagaaaaaaaaaacagggttgggaagagctgggcaagtctcttacctcctgagtggctgtttcacattcactaaatgggggtgatgatgcctatctcagagatttgagaaaatgattaaattatataagacatggtaaaccctacacttatgagtgattctaatagtgatttcctttcttccttgctggacagatccatctgtgtgtgctgtggaattcaggatacttgggcattgcctactatgatactagtgactccactatccacttcatgccagatgccccagaccacgagagcctcaagcttctccagagaggtggggatggaaccatgaattcctctgctctctgggattgcagatgtgttacacacacacacacacacacacacacacacacacacacacacatattttttttttctagacagagtcttgctctgttacccaggctcaagtgcagtggcgcaatcttggctcactgcagcctccacctcctgggttcaagcaattctcctgactcaacctcccgagtagctgggactacaggcgtgtgccaccacacccagctagttttttgtgtgtgtttttagcacagatggtgtttcaccatgttggccagggtggtctcaaactcctgaccttgtgatccgcccaccttggcctcctaaagtgctgggactacaggtgtgagtcaccacgcccagccatgttttacttacattaactcacctcactgtctagcatattttgtgttgctgtaaggaaatacctgactctgagtaatttgttaaaaaaaaaaaaaagttttatttggcttatggttctggatggttggaaagctcaaaattgggcatcttcactggtgagagcctcagactgcttcaactcatggaagaagggaaggcagggtgtgtagaggtcacatggcagagaagaagcaagggggagggagatgccaggctctttttgacaaccagctctctcaggaactaatagagtgagaacctctcactcatacccaccaacacactccaggaagggcattaatctgttcatgagcgatccactcccatcacccacacacctcctgctaggccctacctcacaacactatcacactggggattaaatttcaacacgatatttggcagggacaaatcacatccaaactatagcactgactcaatatattttacagttgcttcacagaggctccctcttttgtttttatgaattcatttcattatttaacaaatatttgtgaggttgttttttggtttgtttggttgttcttttttgagacagtgtcttgctccgtcactcaggctggaagtgtagtggtgccatcttggctcactgcaacctccgtctcccggattcaagcaattctcctgcctcagtctcccgagtagctgggattacaagaatctgccatcacgcctggctaatttttatatttttagtagaggcagggtttcaccacgttggctaggcttgtcttgagctcctggcctccagtgatctgcctgccttggcctcccaaagggcagggattataggcatgagccactgtgcctggccacaaatatatatgacgtatttacaatgtttcaggtgcttcagattcagccctgggcaaatcagtcatgtctgttctccaggggtttacagcctagtgacaacatccagaacatcccacttccctctcaccatcccaccactcttaactacttttctaaatctcaacttctacctgtgttcccactgtgcagagcactccctactcctagggaggaaatgtttttgagaaggagaggggtaggaagaggagggctatgggttttctcttagtcaaagacaaagatcctttaactcatttgatctctgttctccttccaagttctggatgagatcaatccccagtctgttgttacgagtgccaaacaggatgagaatatgactcgatttctgggaaagcttggtaaggacttggtaaaggatagagggaaaatggggaaggactaatatatggaatattccagggggctagaattgggtgagagggagtgtcagacagaggtagaaggactgagatgtaaagaatgatagccttttctttcctcccccacagcctcccaggagcacagagagcctaaaagacctgaaatcatatttttgccaagtgtggattttggtatctccttccttttgcttagcctaactccctgttccggtgtcccattctttcccccaactctaccttcatcatcacagatctcccctctgccttatgtcatcctaaacctttgtgctcctcatgccctatgacctgtccccccaagatctctcctgctccctaccctttaataacctgcagcttattgggaagcctctgcttaagtcatgtctagggatgagggcctcccctgaggagtggtgacactttttggacagggttttattgttggaattctccccattaagttaaagccttttatcaccaaaccaaaaggcactgcctcagtgacccttattatgatccataaggcacttctataactttcctaggtttacaataagaacaggagtgtactatcctaattagatattaaggcattagtgttactagttctattaataccattattttgaccaaaatcctcaattccagacagatgtctactttcctcagccatttatctttctcaggctgtgctttcagacaagtatctttatattatatgtagaataaaaagagaattagactaagagtctgaaaatttggttcttgctctagctttccattaactgcctgtgtgagcttgggcaagtcaaataatctctcttgcttctattgtctcattcttaaaatggggtgaaaaaattgagctacaagaccgttccctttgcttgcctccctcaaataggtctggagataagcaaacaacgcctcctttctggaaactactccttcatcccagacgccatgactgccactgagaaaatcctcttcctctcttccattattccctttgactgcctcctcacagtgagattggtcctgggggataagggctgggaggcggcacaagtgctagggctgaattctgggaggtactggcctagccctggaaaatagtaactttccctggtgctctgcagcccccaggagatttaagatttaccccgattccactgctgatcccctcccaggttcgagcacttggagggctgctgaagttcctgggtcgaagaagaatcggggttgaactggaagactataatgtcagcgtccccatcctgggctttaagaaatttatgttgtaggtgattcaccccaaccccaaccaaagtaatgtgggattgggaggcctgaaaagtaaagtgggggtggggtgtggatgtggctgtgacccagtgggtcaagtgctctaggacacccgggagaatctaagggctaatgagactttgggaagaagactgggacaatattcagagagggggacaaaggaagtggagttgtggaacgaactcagactgcttcctgcttttttgttttctgtcctcaggactcatctggtgaacatagatcaagacacttacaggtaaagaggtggaggcatgctgctgtctctggggagggagaaggattaagtttaatgccccaataatcctaatgaggctctagtttccctaatcctggggctattaagatctctctccttgaaggaaagggaaggggggttttgagggaaagagaggaagaaaagcataaagatactagctttcttttctatagggagaaactgaggcaaagaaaagtaagggacaaaccttacatcaagatatgatctcggctgggcgcggtggctcatgcctgtaatccccgcgctttgggaggccaaggcgggtggatcgcctgaggtcaggagtttgagacctgaccaatatggtaaaaccccgtctctactaaaaatataaaaattagctgggtgtgttgtgcgcctgtaatcccagccactcaggaggctgaggcaggattgcttgaatccaggaggcagaggttgcagtgagctgaaattgcaccactgcactccagcctgggcgacagagcgagactccatctcaaaaaaaaaaaaaaaaaaaagacgtgatctcaggaggatatcccctgtccccattccatttatcagtcctcaattcttattcccttcaaaagtccaagttaccccaaactcctccatttctcctcgacagtgttctacagatttttaagagtgagtctcacccctcagtgtacaaagtggccagtggactgaaggaggggctcagcctctttggtaggtgtgccccatccctcatctcacattacaaagacctaccagaaaagcaattggctccaaagatgtgtcccagcctcccttcccacttcactcccattgtcagatatctctttcatgccaatccaaatttcttacctatttgtaccccccgccccccaagcttgagcatcttcccatactttgtggctgtacagtgttgttgcatatcagccattactttaccaattctgtgttccttccctgggtttgtatgaatgtttctactagttgggtacctgttagggactttgggagaccttgtgtatagagaagagttttgtaactgcataactgcctatttgatttgtatagagtctttatcagttgtctctggctttagggtatattagggacatctccgcaaatatccatatagtttcatatctcagtaagttgtgtccaggttttttttttttttttttgaggcagagtctcgctctgtcgcccaggctggagtgcagtggtgcaatatcagctcactgcaagctctgcctcctgggttcacaccattctgctgcctcagcctcctgagtagctaggactacaggtgcccaccacgatgcctggctaatttttgtatttttagtagagaacgggtttcactgtgttagccaggatgatctcgatctcctgacctcgtgatccgtccacctcggcctcccaaagtgctgggattacaggcgtgagccaccgcgcctggccagttgtgtccagttttgtgtgtgtgtgtgtgtgtgtgtgtgtgtgtgtgtgtgtgtgtgacgaagtctcgctcttgtcccccaggctggagtgcaatggtgcgatctcggctcaatgcaacctctgcctcctgggttcaagcgattctcctgcctcagcctcctgagtaactgggattacaggcacctgccaccacgcccagctaatttttgtatttttagtagagacggggtttcaccatgttgcccaggctggtcttgaactcctgacctcaggggatccactcgcctcagcctcccaaggtgctgggattacaggcatgagcgaccgcgcccggccgtccagttttttacatatgtgtgttgggctcttgagttttttgtttgtttgtttgttttttagatggaatcttgctgtgtcacccaggctggagtgcagtggtacaatttaggctcactgcaacctccgcctcttgggttcaagtgattcttctgcctcatcctacctcagcctcctgaatagctggaactacaggcctgcaccaccatgcccagctaatttttttgtatttttagtagagatggtgtttcgccatgttgcccaggctggtctcaaactcctgagctcaagtgatcctcctgccttggcctcccaaagtgctgggattataggcatgagccaccctgcccggccagctattgagtttttgtatttttggaggggcgggagggctcttgagttttttgtgttttgtttgtttgtttatttgtttcgttttgttttgagacggagtcttgctctgtcacccaggctggagtgcagtggcgcgatctccgctcactgcaagctctgcctcccgggttcatgccattctgcttcagcctcccgagtagctgggactacaggtgcctgccaccatgcccggctaattttttgtatttttagtagagactgcgtttcaccatgttagccaggatggtctcgatctcctgaccacgtgatccgtctgcctcggcctcccagagtgctgggattacaggcgtgagccaccgtgcctggccagttcttgagttttaactaggtctgctttgtgtatttttctggctaagtgtccctgtgagtgtccatcccttcccccatctccatgtacggtaatcccagctcatatttgtggccaggcaccagctttggctgcctttgtgccctcccaggccagcttcctcaacaaccagcacctctgacctggatgcctcagcttagacacataaacacattccattccctgtccctgccttgtaacaagttcactccctgccttatccctcacaggaatcctcaacagatgccactgtaagtggggagagaagctgctcaggtgagtgggtcccacacatactacacactaatgcatgaattccatatgcacactacatactaaagcctactaatggcagtatacagattctcacatacaccaccccacctagtagtagtaaagcaactgccctttactgagcactggctaactgcatttcatccttataacagctttgtgtagtagctgatatgcatctcattttttgttgtcagcgcaggtacacatatacccattgatgatacacagacttgcacacatacaagcagcaggaaaaaacacaaaatgtaaggccgggcacagtggctcacacctgtaatcccagcactttggggggccaaggtgggtgaatcacttgaggtcaggagtttgagaccagctggccaacatggtaaagccccatctctactaaaatgcaaaaattagccaagcgtgttggtaggtgcctgtaattccagctactcaggagactaaggcaggagaatcgcttgaacccaggaggtggaggttgcagtgagccaagattgtgcactgcacttcagcctgggcaacagagtgagactccgtctcaaaaaaaaaaaaaatgctaatgtaacacatggctatgttagcatggttatctttagttatagaaaacacacttcacatttctgtgatgactctcaaatttgtgtctctagttttgaactccgtatgtgaatgttaattgcatatcaccacctgcagttttcacaggcagctcaaactcagagcatccaaactgatgcccaccagatctgttcctcttcctgcattccctttgctggttaatggcattgctggcagtacaccttctcaagccatgaaccttggattgatgctagaaacaaaaaacctgtcattccaaaacagagatctaagcatgtcactcctttttttttttttttttttttgtgactgagtttcgctcttgttgcccaggctggagtacaatggcacgatctctgctcactgcaacctccacttcccgggttcaagcaattcttctgcctcagcctcccaagtagctgggattacaggcgcccaccaccacacctggctaatttttgtattttcagtagaggcggggtttcaccatgttggtcaggctggtctcgaactcctggtgatccgcccacctcggcctcccaaagtgctgggattacaggcatgagtcactgcgcctggccgtcactccactttttaaatagcctaagtagaaagaaaataacataaaccttaggaggttttcccattaccttcaggattaagattagcatcttaagcagtataatgatgttcagggtccatcacgtttaccccagttttaatttccagactcaccttccaaagccccttctaagtcctttcctactggatctaccttatattctagtcatttagggccacttgccattatggaaacatgtcatgcctgtgtttatgctgctccttctggaaagtcttttttttttttttttgagacggagtctccctctgtcacccaggctggagtgcagtggcgcggtctttgctcactgcaacctccacctcccaggttcaagcaattctcctgcctcagcctccggagtagctgggattacagggacccaccaccatgcctggctaatttttgtatttttagtagagatgggatttcaccatgttggccacgctggtcttgaactgctgacctcgtgatctgcccacctcggcctcccaaagtgctgggattacaggcataagccactgtgcccggcctggaaagtcttttccttgttctgtacctatcaaaatcttacatccaggtcaggcgcggtggctcacgcctgtagtctcagcattttgggaggctgaggtgggtggatgatttgaggtcaggagttcaagaccagcctggccaacttggtgaaacttcacgtctaccgaaaatacaaaaattagcccagcatcatggcgcatgcctctagtaccagctactcaggaggctgaggcaggagaattgcttgaactcgggaggtagaggttgaagtgagcccagattgccccactgcactccagcctgggcaacagagtgagattctgtcttaaaaaaaaaaaaaagtgcatcctcttcaaggtgcaatccaactgttaccctttggcttttacaggtacctgtaaggagttgatgtgcaccttctttgtgctcacatagtgcttgtttatgtttttctagttgcactgtcacatcatgttagaattagcagtcagtgaatctgcttgcctccatagctatgaactctatctagtagctatacctgttacctcagtgtctgacacatggtcttgtacatagtagcactcaatgtgtgaacacaacgcaaatgtaaacgcactggtgacatcatctctaaacagagtggaaacctttgctagcctcaggtgcacaatccttcccctacctcacctcccgctgcaatgtgtgtcttgtaggagttaatttaggataatctctgaggtcatctccaggtaatcagcatctccaggaatcggcagggtaatttaattacccacacattcttcagtgcttcaggtgcagatctttaatctcagccacagatgggagggagagaattctcagtggagaagagagctggatttaaggtcggggaggaatgcgtattccccaaatggaatcagacagggcatgagatcatataacttgaagaatcatcatataatctaatgaactaaggacaggtgacatatttattaatatttctgtatacgaatttattttaatttattaggaaatacctctaacgtacaaaaagatgtaaataataatatagggccagatgtggtggctcacgcctataatcccagcatttgggaggctgaggcaggaggattgcttgaggccaggagttcaagaactaaaagctgtacaggcaccaagaatatgactgaatgtcacagtatgctctaaagggcactgtcctaggagtctggagacatgattttgagacttagctgttctcattggcggtatgactttgggcaagttgcttatcttttaacggtttcattttctcagttgttaaatttacagtttggtttaactaaagtctctcccagtacgagcagggcgtgagtcagagatacctaagtgtttagtgcagcgcatgtgctttctaaagtggggatggctatttacagactggcctacactgttctggtgggagccctcagtgaccaaggagcagaggtacctgaaacccacccttgaagccatctggatgctccgcttcattcaaatctggggtgttctaacccaaagtaactggccacagactgcaatgtaagatacaaatcttcaggacctagtgtgtgcacatgttggctcttatataagatggcatccttagtacttgttctatgtagaaaagaatttgtgggctcacaagtccctacagagtctcacactctcatggccaataagtatacagggatacccggaattagacaaacacagatgagacatttatttctgtatatgaatttattttatttatttatttattttttgagacagagtctcactctgtcacccatcctggagtgcagtggcctggctcattgcaagctccacctcccgggtttacaccattctgcctcaccctcccgagtagctgggactataggtgcccgccaacacgcccggctaattttgttgtgtttttagtagagacggggtttcaccgcgttagccaggatggtcttgatctcctgacctcgtgacccgccctccttggcctgccaaagtgctgggattacaggcgtgagccaccgcacctggcctgaatttattttcatttattaggaaatacctccaacacacaaaaagatgtaaataattagccgggcgtggtggctcatgactgtaatcccagcactttgggaggccgaggcaggtggaacaccagaggtccggagtttgagaccaggctggccaacatggtgaaacctcatctctactaaaaatacaaaaattagccgggagtggtggtgcacccctgtaatcccagctactccagaggctgagacacgagaatcgcttgaacctgggaggcggaggttgcagtgagctgagatcgcaccactgcactccagcctggacaacagagcaagactctgtctcagaaaaaaaaaaaaagatgtaaataataatactatcgggccaggtgcagtggcttatgcttgtaatcccagcactttgggaggccatggcaggaggactgcttgaggccaggagcttgagaacagcctgggcaacatagcaagacctcgtctctataaaaactattaatagtaatacaaatggccaggcgcagtagctcatgcctgtaattccagcactttaggaggctgaggcaggcagatcacctgaggtcacgattttgagaccagcctggccaacacagcgaaaccctatctctactaaaaatacaaaatttagctgggcatggtggcacacacctgtagttccagctgctggggaggctgaggcaggagaatcacttaagcctgtgaggcagaggttgcagtgacccgagatcccgccactgtaccctagcctgggcgacagagcaagactccatctcaaaaataataataataatacaaatatctatatatccatcagccaatttaagaataagacatgccgggcgcggtggctcatgcctgtaatcccagcactttgggaggccgaggcgggtggatcacaaggtcaggagttcaagaccagcctggccaagatggtgaaaccccgtctctactaaaaatacaaaaattagctgagcacagtggcgggtgcctgtaattccagaacctgggaggtggaggttgcagtaagccaagattgtgctactgcactctagcctgggcgacagagcaagactctatataaaaaataaaataaaaaaaaagaataagacactattggccgggtatggtgactcacgcctgtaatcccagcactttgggagccgaggcgggcagatcacgaggtcaagagatcgagatcattctggccaacatagtgaaaccctgactctactaaaaatacaacaattagctgggcatggtggcgcatacctgcagtcccagctactcgggaggctgaggcacgaaaatcacttgaacccgggaggtggaggttgcagtgagccgagatcgcatcactgcactccagcctggcgacaaagcgagactctgtctcaaaaaaaaaaaaaaacgaaagaataagacattgttgttgaagccccttaaatgtccctccccaatccttttttctctgcagtgttgaccattattatgaattaaagcttatcatccctaatgggacagttatgttttcacaggaagaatatgaaaagatgaatgtctgttgctgttacccagagacactttcacagctaaaaagacatacaaactcatactgactcaccgtctcttactcagcctcagagtgagctgcagtgttggcacacaaatacctcaacacactgctctccttctaaaatattgacaagctccgttacttatatacatggaatgacacacggtcttatccgttgaaactgtgatatgtagacacaattatgctcacatctagcaattttcagtagatacatgtaaacacacctgaatgggtaggacactgcacttgccactacattcccatagcacatcgtggatacatattgccacaatccccagggactgcaagcacactttttggcaaactgagatcaagatgatagatgtaacttgtagtacccccacccaaaccctcacttccaggctatggttcacacgtccgactcatgacctgggggagctcagttctcgtctggacgtcattcagttttttctgctgccccagaatctggacatggctcagatgctgcatcggctcctgggtcacatcaagaacgtgcctgtgagcccagggtggagggcagggaggtggggaaggaggttgagggctgatactgggcagtgggcttcttgaggggcattagagtgagggaagagaaaacagcggctgtaaccttgtctgactgtagctgattctgaaacgcatgaagttgtcccacaccaaggtcagcgactggcaggttctctacaaggtaaggccttccttcttgaatcccaaaagtccaggtaaaggccctcagcctgtattccagactgtctgtaccctagacatgctgtccaattttattctaccctcttttttttttttttggagacagcctcgctctgtcgcccaggctgaagtgccatggggcgatcttggctcactgcaacctccgcctcctgggttcaagcaattctgcctcagcctcccgagaagttgggattacaagcgcccgccaccatgcctggcaaatttttgtatttttagtagagacaggatttcaccatgttggccaggctggtcttgaactcctgacttcaggtgatccacctgcctcagcctcccaaggtgctgggattacaggtgtgaaccaccaggcccggcctccctctttttttttttaactttgtattcaggaaaatgtaaaaaatatttagaataatataattaacccccatgtacccaccatgcagtttcaacactttaacttacgccaattttttttttatttctttttctttttttttttagacagagtcttgctctgtcgcccaggctggattgcagtggtgcgatctcggctcactgcaacctctgcctcccaagttcaagtgattctcctacctcagcctcccaaatagctgggattacaggtgcccaccaccacactggagtgatttttgtatttttagtagagatgggatttcaccatgttggccaggctggtctcaaattcctggcctcaagtgatctgcccatctcggcctcccaaagtgctaggattataggtgggagccaccgtgcccagcctagtatgtgtcatctatatctttttctactttcccctcttggattattttgtgggttttgttgtcgtttgtttgtttttttaaataaggtcctgctttgtcacccatactagagcagagtggtgcagtcatatttcattgcagcctctaacttctgggctcaagcaatcctcccaccttagcctccagagtaactgggactataagcctgagatgctgcacctggctttcttggattattttgaagcaagtcccagccattatatcatttcatccataaatatttcagtgtaatttcttttttctttttttttttttttttgagatggagtctcactctgtcaccaggctggagtgcagtggcatgatctcggctcactgcaacctccgcctcccaggttcaagcgattctcctgcctcagcctcccatgtagctgggataacaggcacatgccaccatgcccaagttttttttttgtatttttagtagagacagggtttcaccatgttggccaggatggtcttgatctcctgacctcgtgatccacccgcctcggcctcccagagtgctgggattacaggcgtgagccacctcacccggccaatatttcagggtaatttctaaaagaaaattattttttaaaaagaataacagtattgttatcttactttaaaaattgtattatttggtatcatcaaatatctgaaatttttcttttttgagacagggtctcactctgtcacccaggcttgagtgcaatggcacaattgtagctcactgcagcctcaaactgttgggctcaagcgatcctcccccctcagcctcctgagtagcagggaccacaggtgatggccatcacaccgaactaagtttttattttttgcttgcatttatttatttatttatttatttatttatttatttttgagacgggattttgctcttgtagcccaggctggagtgcaatggtgtgatctcggctcaccgcaacctccacctcctgggttcaagtgattctcttgcctcagcctcccaagtagctgggattacaggtgcgtgccaccacgcccagctaattttgtatttttagtagagacagggtttctccctgttggtcgggctggtctcgaactcccgacctcagatgatctgcctgcctcggcctcccaaagtgctgggattacaggcgtgagccattgcacctgaccaattttttattttttgtagagacaggatctcactatgttgctcaaggtggtctcaaactcctgagctcaagtgatcctcctgcttgggcctcccaaagtgctgagactattggtgtgagccacgatgcccagtcagatgatggccctagtcctttttaatctaccggttccttctctatcttttctctcttgttctttctttctttttctctttttcttctcctggcaatttgttgaagaaactagattattatttgtcttatagtgttttccattagcctggattttgctgtttgcatttcctagatgtttttggcacatttctctctcttctatagtttctgtaaattaatatttagttctagaagcatgattaggttcagagttttttttttttcaatactgttttagaagtagaggaacataatgtctgatatgtccgattgtctctctttttctgatgttggcaaatgttctgatgtttaatacctaaatctattattcatttatttatttatttatttagtttgaggtgagtctccctctgtcgccaggctgaagtgcagtggcacgatcttggctcactgcaacctccgcctcctgagttcaagtgattctcctgcctcagcctcctgagtagctgggacttacaggcgcacaccaccacgcccagctaatttttgtatttttagtagagacgggatttcaccatgttggccaggatggtcttgatctcttgacctcaggtgatccacccgcctcagcctcccaaagtgctggcattacaggcgtgaaccactacacccagccatctattaattctttagcaattacaaagtagtagcatttaaatctctgattctttcttcatttattagccagaaatttctgtaaagagaaacttccttttatgtactatttggttgccaagtgatagaaatcatatagaaatacagaaaattgcttgatatttcccccactcttttttttttgagacagagtcttgctctgtcaccaggctggagtgcagtggcacaatcttggctcactgcaacctccacctcccgggttgggtttcaagtgattctcctgcctcagcctcccgagtagctgggactataggcgtgtgccaccatgcctggctaatttttgtatttttagtagagacagggtttcaccatgatggccaggatggtcttgatctcttgacctcgtgatccacccgcctcggcctcccaaagtgctgggattacaggtgtgagccaccatgcccagcccttttttttttccccaatatggaacgcttcttgaatttgtgtcatccgtgcccagtggccgtgctaatccctgtaaccttcgaaatttcagtatatgtgctgcagaaatgagcaccccccacctttatttactagctatcaatatggtaaattagttccctaacattctccaagatagccatgagatttttttgttttttgtttgtttgtttgtttgtttgtttgagatggagtcttgcactgttgcccaggcaggagtgcagtggcgcgatctcggctcactgcaagctctgcctcccgggttcgcgccattctcctacctcagcctcctgagtgcctgggactacaggcgcccgccaccacgcctggctaattttttgtacttttagtagagacagggtttcaccctcttaaccaggatggtctcaatctcctgacctcgtgatccacccgcctcagcctcccaaagtgctgggattacaggtgtgagccaccgcgcccggccctgatagccgatgaggtttttttgtcattgttcttcttgtatcattacagactcatggccttttatagctatatttctctttctcccgactctgtacaaactcctttgttttagagtttgcacaaccctctatcaaagcacctaccacctcacttttaaatcttctgcatgtatttctgtcttccttcctagactgtgagcacatctgggacagggaccatatctttttttgtttatttgttttgttttgagacagagtctcgctctgtcggccaggctggagtgcaatggcgtgatctggctataacctccacctcccgggttcaagagattctcctgcctcagcctcccaagtagctggaattacatgtgcatgccaccaagcccagttaattttttgtattttgagtagagacagggtttcaccatgttggtgaggctgatctcgaactcctgacctcaggtgatctacccacctcagcctcccaaagtgctgggattacaggcatgagccactgtgcctggccaggaccatatcttaattgtctttgtagtttcagtgtttggtacagtgcctctcactgtttctttttgcctttgagatcttccctctttgttactgtgatcttccctactggtctttgttcttctgagtctgtccctatcaccacctcaacccgagctggatgtggcctgtcctcctttttgtgtttctctcacagactgtgtacagtgccctgggcctgagggatgcctgccgctccctgccgcagtccatccagctctttcgggacattgcccaagagttctctgatgacctgcaccatatcgccagcctcattgggaaagtagtgagtagaaggaaaaagggagtgcacccagggaggtcagggagagagaatgcagtgtgcaagatggggaaacatggaagatattgaggtcaattggataaagaatgggatggtgggaggaggcagcagaacttcagggaagtatctggagggtgagagttaaaggaggactgcagggagaattggggcccaaggagagctgaggaacaggacagagggtgccaggtcctaagaaacagtacttatctcctcaggtggactttgagggcagccttgctgaaaatcgcttcacagtcctccccaacatagatcctgaaattgatgagagtgagtgttgggtgtggatgggcctgtgagccctgcgcagtgatggagtaccatccttggcaggtggtcaccacagctggggatcttcatagcaaccagggcaggagactcacttttgataaccacgtgtcttccaccctcgtagaaaagcgaagactgatgggacttcccagtttccttactgaggttgcccgcaaggagctggagaatctggactcccgtattccttcatgcagtgtcatctacatccctctggtgagggcaggagagtgggtgtagccttcagatgtcttttgggggagatattaggcttatgaaagacatactggtagataagaaaacttgtggggcagcctgaagaacatgaacacttttttgtggggatacagggatcttttaagctccctctagggtggggaggtgtccagtaagtctccaagcaggagagtagagtatctcctctttactctccccagattggcttccttctttctattccccgcctgccttccatggtagaggccagtgactttgagattaatggactggacttcatggtaagaccctcaacctctgtaaggtgagtgatgaggaaaatgagtcagcagctgaggaagagcgttactctacagcagcactgcccaatatgggatctctcctctgtagttttactctgagctttaccagcactgagacaaaggaaagagaagtcagagttaggggctggaggtggggttagaaagatggggaaggagaggaggaccaagagatgcaaagtccacagctttgaacccctgtacccagtttctctcagaggagaagctgcactatcgtagtgcccgaaccaaggagctggatgcattgctgggggacctgcactgcgagatccggggtgaggaaaagccagaggttatatgcattgtaagatgtttaaaaaaagcagcagccaggggaaggaggggagtgggcaacttggggatgcttccaacaggcccctcctcttcctgctctctgtctcgctcactctgactctatcttttcctctgaatgtcttgaggtctcagattgtatctgcaacctgtttccagatccccctaggggcctctgcctctccttcactttcccctggaactgacctccagctcccttcctcacccactcccagaccaggagacgctgctgatgtaccagctacagtgccaggtgctggcacgagcagctgtcttaacccgagtattggaccttgcctcccgcctggacgtcctgctggctcttgccagtgctgcccgggactatggctactcaaggccgcgttactccccacaagtccttggggtacgaatccagaatggcaggtaagaatagaggcgggtggaggaatagacatgaggggcccaaaggctacatcttctgggggttcatctatcttgatccacaagccatgcgaggtgcctctccgcccactgcagacatcctctgatggaactctgtgcccgaacctttgtgcccaactccacagaatgtggtggggacaaagggagggtcaaagtcatcactggacccaactcatcagggaagagcatatacctcaaacaggtgaggagaagccctgcagcctgggcctctggcgtctcctgcatctactccacccctacttgccagccaactcaggctcctgcagctcttctcccattttctgaccccgctcttcatgaaaggaccatcacccacatccctgtgcttccacctcacatgttcttattctccactggagagccatgctctaatggaactttccgtggcccaaattccttcacctgcctctgagtaggtacacaccactcccaagtatgtctctgcccacgtcccgtgcctcttcactgattctaaattagcccacagggctatggtcaggattcggggaggagagacagagtcagtgtgtctgttacctatttctcctgtttcaccctgtccatttctctttgatgtgccattcatgccttgagcctcactttcacctcagcccacggcaccaggccccaggccctgtctccttccctattcaggtaggcttgatcacattcatggccctggtaggcagctttgtgccagcagaggaggccgaaattggggcagtagacgccatcttcacacgaattcatagctgcgaatccatctcccttggcctctccaccttcatgatcgacctcaaccaggtcaaagggaacaaagggaggtgggattgaggaaggggataatgggaaaggaacccctgaaaatgctcataacaggaaagcatgccctctgctgcatgccctttatactaaaagtggggagcactaaggtcagagataagaagaatcaataccataaacatttcttgaacccttgtttcatgtgagtcactgttggcaaagaggatgaacaaagcgtgcacctcaccattcaagaacttgcagtgcagtagggagggcatgtatacagctttattcacaggccaactgtggtcagtgcgttacgggcttccaatactaactttcccttgtccaccttatacccagcaggtggcgaaagcagtgaacaatgccactgcacagtcgctggtccttattgatgaatttggaaagggaaccaacacggtgaggggagaaactgatgaggggagaaactaaggaggggaaaatggaggaggatgaaggagcatgacagtgaggctgggcctctggaatggaatagggctgtgtgggcagaaaagaaatagaacacgagacagggaaaggcagtgcaagtgcagaggggcatatggggtccccatggctccgaatgctaacctctgccctctttgcaggtggatgggctcgcgcttctggccgctgtgctccgacactggctggcacgtggacccacatgcccccacatctttgtggccaccaactttctgagccttgttcagctacagctgctgccacaagggcccctggtgcagtatttggtgaggagaccaatctagctcctcggggacccccaggctgggcatttcccagaggtggggattggctcctctatcagaacaagggctccctcagcacagagaccacatcccttcccttttctccctccccacaggattggccaagggtttcaggacaggaaggaggtgattgatgatacactgtcttttattctcttttaagaccatggagacctgtgaggatggcaacgatcttgtcttcttctatcaggtttgcgaaggtgttgcgaaggccagccatgcctcccacacagctgcccaggctgggcttcctgacaagcttgtggctcgtggcaaggaggtgatgagatccaaatgtgcaaccacctccacatcagagctccctttcattcctagtcctactgggcctgggtctaggtccacaggatttctgacccttatttccccttctcttccccactccccttactcctcccaccttcttgcttgttcctaggtctcagacttgatccgcagtggaaaacccatcaagcctgtcaaggatttgctaaagaagaaccaaatggaaaagtgcgtatatggccccagtgtctttaccctctctgcatcttctcctgcaactcttctccccttttcagggactcagccttcctccagcactttgcccttcagaaacccaccatttctttctgaaatccctaaatcttcaagatcccaggttttctgtgccacagcctctcccctctgcccagggatttggttgtccattctgccataaatcttgcgattttctctcttcttcagttgccagacattagtggataagtttatgaaactggatttggaagatcctaacctggacttgaacgttttcatgagccaggaagtgctgcctgctgccaccagcatcctctgagagtccttccagtgtcctccccagcctcctgagactccggtgggctgccatgccctctttgtttccttatctccctcagacgcagagtttttagtttctctagaaattttgtttcatattaggaataaagtttattttgaagaaagatattgtttctttagtctcaaaacaagagactaggaaagatccaaaacacagagcaggagtccacaggggaacctgccctgcctcagtaaaaatacagtgttgttgctgtaggaagactcccggattctaccccaggatacttcatgagaacgaaccccttcagagaggccctacaaaacagattagagggaagacagaggggtccaagggagatggtctctcttctcaagtaggaacaccccagcctcagacagacacagcaggaaggggcctgagaggctgacagaggcaggatgggtgcaaggcaggggtggaggggagggaccagcccgggctgcaccagtgggagtggctccacccttcccacctcagagccatggggagccagggctctggcggggtgcccttggtgcaggctccctacacagtcctgctgctgccgctggggacaagccgccaagacccaggggcccagagcttcttcctttgggtgagtatcagcccaacaagaggtcccaggggaactctctcaatagatctgccctttatatttccattgaacttgagggcccacagtgttcccgcctgcctccccttgccctccaggtcctcagtggccagtctgggttcacactcagtgaccacacagtgaacccaactaggggtggagagaaagggccataacccagagccctactgtggcgtgagagtcagcctctgtgattgcctttcccagctacgcaggatgcaggctctggagagagaacaggatgccctgtggcagggtctggagctgctacagcatggccaggcctggtttgaagaccatctgagggaggcacagcgacagcagctgcatctaggggcccttggtgaggtatgggggctgcccctctgtgtgaatggggggaggaccagggagggaggaacagggaatgtgtagacacagcctgagaccactctggagaggggagagttaatggtcagggatcatgagttggaggcagcatcgtaatgacaggatgccaccaagtgttaagttggtgttcattgttggggctggaggaagctggtctgcattccattcagagggatttggatcactccatggagatgagggtgtggcctggattattccaatggggcagggatggacagggaggctccatgaagagtagtgaaagggggtattgtgctatttgagggagatggaggaactgatgtgctaaagagatggaggtggagagtactggattttcccacctgcctgggagggtactgggacgaggggatccagatgagagggatggcctgtggtgacaggaatagagtggcagacgacctcaggttttcaccatgttgtcagcctccaactcctcctctagaattttctaacagatttacactcagagcctggtcgccccccgttagcccagattcaaaaggtgaacatctgtttgcagaatctgattcatgagaaggtgagtttattgttttcagtttagacttttgggaagttggactagagaggggagttgttggggtcagtgctggcttaacagaaaacacagcgaatttcccctccagttctccccaagtccactgaacaaggctagttcctgcaccacccaggattcaaaggaaagacgaagggagcagaacttgtggcagcaacaggtaaacttcaagaaggagggcaggagccccaccctacagggctgggaggagcccagaggccccatctgtttctcctccaggagttgtcaaggcagcagaaaggagtcacccagccaaaggaggagatggctcagcggggctgcaccaaggggccaagaggccctacccgtgtctaaaccctcctctcactcccctaagcctggtgaaagagtcagaagccccaggctcctttttctgtttcttaactcaacagctaaaaaatggctccaggtagtgagtcaatgaagttcagacatgttggtgtaaagtttctcctctgctcctgaaaacttcatcttcttggtgtctcatgtcctcattctcccctatatgacatgcaaaaacgatctttctttgaaatccctctgggaagaagacatgtttattgaaactgtccttcagccttaaatacaaaaataaaactgaaactgctccagaaagcagctttctccaaaaatgtctttggtttgtttctcatagggttaggaaaagtgcattgtgggaatatccattgccctctatcccagtcttgcagggtgttttgttttgttttgtttctgagatagggtctcactgtcgctcaggctgtagtgcagtggttcgaccacaactcactgcagcctcaacctcctgggctcaagtgatcctcctgcctcagcctcccagagtgctgggattacaggcgtgagcactgcacccagccccagtctcgaagtttctaagaaaggaaagggatgtgatggagaaagaaaaccttcattggctgggcacggtggctcacgcctgtaatcccagcactttgggaggccgaggcaggcagatcacctgaggtcaggagtttgagaccagcctggccaacatagtgaaaccctgtctctactaaaaatacaaaaaattagccgggcgtggtggcgggcacctgtgatcccagctacttgggaggctgaggcaggagaatcgcttgaacctaggaggcagaggttgcagcgagccgagattgcgccgctgcactccagcctgggcaatgagcaaaactacatctcaaaaaaaaaacaacaacaacaaaaaagagaaaaccttcatcccagctaggagaggtaaggtcctaagacctatgtgacaaatgtgtcccaggtcttcttaccaatggggcaggttgaaaatagtgctggagacccatccctttagagcccgttgtgtcaccaggaggccaggcctagcagaagcagcacccctccaactgtgccccaccaggggctgcccgcagccagccctgccccagccctgccttgagtcaccaatgtgaagggggaaaaggcaggggtggccgtggtgaggatcgggtcagatgagccggtaggggtggtgtgccggtcctgtggggaaaaggaagagaatgacagggtgtgctagagctgtactcaaattaaacctacaccaccctccccggccttgcccaccctgtgatggaaagtagtagttcctcacctgcggggctggggccgataccaggagccggaggaaagcatgagtcgggggtactgggttggcttctcgtccccctgcagtcacagtcaccatcaccacggaatccggggccgctgaatctgggacctccagccacaggcggccccaggccgactcattcagttccaggtgagccctggagagaggatataggcgtcgctaaagctccaggctgcccagagcctagagtcgggacgcctgcaggggcacgggagcggagaggaggattctgagggccagtcggagggggacaggggcagggcttgggataagcattggccgggcaagatgccagagggagctggagggttcatgagcctcacctggagaggttggaggtgagggagaagctggggttgacgaaagtcctaaggtcaagatcctgagggcccgagaagctggcgatgcggagactgagcgggactttgctgcccggggccaagaaacccgaggggccactaagctgcagagaagggttcttcagggaaggggccgctctaactctctccagccccagccgcactttcccctggcgtctcacctccagaaggacagggactacagtgctaggctgaggggcagccctgtgcaggcgccgccccgctgcgtcctggccaatcagctccagggagaagggtctaggggtggacagcagcgtgggcgacagcgaggctgcgaggagacctcgctccggaggtcccacgggctccaagggcacctggcctagttcggcaccctctgggacccctcgaaggatgacgtgggagaaatgcggctgaggatccccaggattggctctggaacccaaccctgtcacttctaccagcagctgggtctgaagacctgggacaggggcgaggaggggagaacattgtgagattcggagacacagggagaaaagaattaatggccttcaaaataggggttccctctggggagtatggatgggaaaataggttaccttcgaggggtattgatggggagcatcaggagggagttctggggtgctggaaatgttctatatcctgaactgggtgtattatatgaaatccatcaaactgtacactttagtgcacattatgtaaattataactcaatataaaagttatgcatatgcacagatgtatgtatacatatatacattatatatataatatatatattatatattatatattttatatatatataaaaaactgggggttaggtgggtgggggctcagggaataaatgtacctgcaactggctgagtcagggggtagaggccagggtggggtccatcctccatggggatcccaaagtggaagaggaagtccagggaggtctgggctgggaaagggcaaaggcagtcagagcccttcctgaaaggaatgtgactgatcgtgttctctgaggcctgcagtctctgcttccccttcccaggaacacctccctccttaccttgcactctcaccccaggggtgtcctcagctgtgacctggatctcccaggttcctgtctgtggagggtcatccatggtcaccatccagaactgcccaaagcggcgagtgtgacctagaggacccccgccttcctcctggccctgggagacccctggggtcagggaagagattgtcacatgaagcacttgctctccttgagtacatcccctcgattgtctattccccggtcccctctcttccctctaccttcagaggtacctgcagggttcttgatccagaagctgctgatgtctccgtggatccggactgtgatcttctggagcagcccatccacgctgaacacaagtggctgcccaggcaccacaacaggagggtccaggggaagagtcaccttgagggattggcaggaccagaaaatggggaagaagatgaggtatgggatgaggaacaaagaagaaaggggagatagaaagaaaccacgtcattgggctgggcgcagttggtcacgcctgtaatcccagcactttgggaggctgaggcgggtggatcacaaggtcaagagttcgagaccagcctggccaacacagtgaaactacatctctactaaaaaaaaaaaaatacaaaaaattagccaggtgtggtggtgggctcctgtaatcccagctacttgggaggctggagcaggagaatcgcttgaacccaacaggcagaggctgcagtgagccaagattgtaccattgcactccagcctgggcgacagtgcaagactctgtctcaaaaaaaaaaaaaaaaaaaaaaagaaagaaaaagaaaaaagaaagaaaccacgtcaaacaggcagaaagggataccagtaagagaggggcacggggccagggatgaagttattatggtcagagacaaagttggaggcaagggattcaggatgagacaatcacatcttgtgccccattaaaagatgataggccaggcgtggtggctcatgtctgtaatcccagcacctgggagaccaaggcaggaggatcacttgaggccaggggttcaagaacagcttagtcaatatagcaagactctgtctctgcaaaatacaagccacctccccaaaaagatggtaggacttcctgtggtaaccctggaggcagaatactggaagccaagtggggagaggtttactgatataaaaggacaatgcaggccaggcgtggtggctcgcgcctgtaatcccagcactgtgggaggccaaggtaggcggatcacttgcggtcaggagtacgaaaccagcctggccaaaaaaacggtgaaaccccggctctactaaaaaaatacaaaaattagccaggcctggtggtgggcactggtaactctagcgacttgggaggctgaggcaggagaatcccttgaacccgggaggtggaggttgcaatgagccaagattgtgccactgcactccaacctgggtgaccataagactccatctcaaaaaaaaaaaaagaagtggctagtcatggatctaagaggaagagaaacttcctttcctgccccgtgactggaagaacaacacagcagtgagagtgattcccctttctcctataagaagagaggtgcagcctgaccacccttcagttcctaagtgagggccctggcccccacttaccagggcagccatgctctccccaacaatggctgccacgtctcgaatgtgctggtctttggtgaagatcacctctcctcctgaggccagggccactgctttgtatggctcaaaacgcagaggggacaagatctcacgccgagctcgaccctgaacccttgatgtatcttcagtcaccaggaatgttacctgtacccagaagagagctcagtgattggggtgtccaagtgccatccactattatgaatgagaatccctgtgctcaagctttctccagagctgatggtttgtgataaggtctctgcctgccttctggctgctggggtggggaatcccaatgacagaaccccctgccttcagttagtagttggccacccccttgtaactgtcacagtggatttttggcgactagagccccagttcttcacattgtttattaggcagggtcaaataaaaattcagcgttattaagggtagggcctcttacgtatatcattaaaggtatcaggaaatgttccactcattgtctgcttctcccaccatataccaaggcttgttgggccaccatagtgtggtgcaaccctcgttatgagattgtcatcacagggtctctcacatccctgggaggctaacactgggtctcccactagctctgctcacccggcagcgccgctcctgagtcagggattccacctggttggtgagaaaggcatccttgggggaggcatccgtgaagacaaagatatctgagagtggaggtgtgtgcagcagggccagctggcagggaaggcaacgaccagtgttaacaatggcagtaggaggggaatgggtagagccacggaggatgaagcagaagggaatatggcccgggaaccctacagtgaagctagtggatctaggtgctgaaggtggtggggagccccaggagggatctagctccccctggtggtggggccaggaaacggggaagaagggaggggccagacctgcagggctgacaggcacatctcaggctcgtctccaccccccaaggcatggatctcattaagctgttgccagaagctgtcagggtcactggttgtaaagacagggccgaaccctgggaaggggaaaggaggttaagataagtgaggaaagagctcccctcattcttacccagagccacctccccagttgaggggcctggtgtgcttctggagccgacaggtattgaaataacaatactccattataagactcatacttggccgggtgcggtggctcacacctgtaatcccagcattttgggaggccaaggtgggtggatcatgaggtcaagagatcaaaaccatcctggccaacatggtgaaacctcgtctctactaaaaaatataaaaattagctgggcatggtgatgcatgcccgtagcctccccagtagcctccccagaggctccccagtagcctccccagctactggggaggctgaggcaggagaatcacttgaacccgggaggcagaggttgcagtgagccgagatcgtgccgctgcactccagtctggcgacagactctatctcaaaaaaaaaaaaaaaaagtcatacttgtcagtgcagggcggggcagggcggggcagggcagggcagacctaggtgtccctggtgggaaggtggcctccactccctgaaaaaaatggtggcatttcctgtaggcctttattggctacatgtgcgtatataaaaaaaaaaatggtcacacctattatcccagcactttgagaggctgaagtgggaggatcacttgagcccaggagctcgagatcagcctgggtaacatagtgagaccccatctctacaaaaaaatacaaaaattagccagatatggtggtgctcatctgtagtcccagctactcaggaggctgtggcaggaggattgcttgaatcgaggctgcagtgaggcatgattgtaccattgcactccaacctgggtgacagagtgagactctccctctctctctctcaaaaaaaaaaaaaaaaaaagaaaagaaaaaaaaaaactgggtttcctcataagaaaagagaccgaatagcacttacctcagaggtttattgggaggactaaatgagttgattttgcaaatcttaagatagtgctttgacacataagtgctaagttcttagttatacctttatttatatcttcatcaaacataataagtctattaaatgccagccactgtaggatgtatgcaggcaaataagactcaaatttaggcaactctcagtccagtaggcattttatttgatcatcatttcaactctgggagttaggcaggatgagggaggtgtcaggcctctgagcccaagctaaccaatcatatcccctgtgactggcacttatacatccagatggcctgaagcaactgaagatccacaaaagaagtgaaaatagccttaactgatgacattccaacatcctgccccaccctgatgtgataactgatacccattttacagatgatgaaatcgaggcaaagaaagtttacatgaccagcctaaagacacacagtcagactcaagccagagagtctaacttctaatcaatggaaaaggaatacaatgtagctagttatctcagatgcttcccagaagcctggccccaacaaccccatcttgataccaatctctgtctataggaaatggagagaattgaaaatggcggccgggcacggtggctcacacctgtaatcccagcactttgggaggccgaggcgggcggatcacgaggtcaggagatggagaccatcctggttaacacggtgaaactccgtctctactaaaaatacaaaaattagccgggcgtggtggcgggcgcctgtagtcccagctactcaggaggctgagacaggagaatggcgtgaacccgggagacggagcttgtagtgagccgagatcgcgccatggcactccagcctgggcgacagagcgagactccgtctcaaaaaaaaaaaaaaaaaaaaaaaaagaaaatggtttattagcatgaaagcctaagaaagcagaggccacgtgccaaagcatgaatcatgcattaaactcatggaaagtgctgccattttagaaagagtgggaggcaagtctgctagttatctttttttttttttttagagacagggtctcactgcgtcacccaggccgctctggagtgcagtagtgccatcacggctcactgcagcctcagtctcctgggctcaagtgatcctcctgcctcagcttcccaagtagctgggactataggcatgtgccaccacacccacacataatttttattaatttttttgtagagacctgtgtttctctgtgttgcccaggttggtcttgaaatcctgggctcaaacgatccacccacctctgcctcccaaagtgctgggattacaggtgtgagccaccccacccaggttgctgctaattttctgtatgcacacagtagaggctcactcgggactacaggaagtgccaccccgagcccacttcctcaccacaggcctttatcccttacctttttatcttttcttttttttttctttcttttcttttttttttttttttttttttttttttttgtgacagagctttttgctcttgttgcccaggctggagtgcaaaggcacgatctcggggctcaccacaacctctgcctcctgggttcaagcgattctcctgcctcagcctcccgagtagctgggattataggtgcccaccaccacgcccggctaattttgtatttttagtagagacggggtttctccatattagtcaggctggtctcaaactcccgacctcaggtgatccacctgcctcagcctcccaaagtgctgggattacaggcgtgagccaccacgcccagtctatcccttaccttgaattttcctcccctctactgtcctagccagaccacacttacctgggtcatgaaaaggcaccaggacatagtggacaggctccatggggctgcctctccgctgctccacaaggtggcgagcctggattttggcagcgttgatctcctcacccatgctgcccgtggtgtccaggacaaagctcaggctggaggctggggtgatgtccagcagcctggggagcaagccagagacacagtgaagggcctgcacgtttgtccccagcgcctggtttctcccttcccgcaggagcgcctccccatgaaggggtccatccccaggaggccactcacctggagaaatccctgtctcccaggcggcttcgcagaaggctgaaggcctggatggaggctagaagggccagttttgcagcctggaggtgcagcatgtggtgaggggagaagcctggggatgtgctgtccttgttgatgcctcccctcggtggctgggagctgctccggtcaaaatggcccccgtggctacatttccctgggttggggaaagggatctggagagtggaggtcaaaaacccactgcctcctaagaaaatgaggccctttcaggcctggcctgaccctctcacccctcagcaagggttcagcaagaaatgatgacggggttggcgcggtggctcacgcctggaatcccagcgctttgggaggccgaggccggcagatcatctgagatcaggagttcaagaccagcctggccaacatggtgaagctctgtttctactaaaactataaaaattagccaggtgtggtggcgcgtgcttgtaatcccagctacttaggaggctgaggaaggaaaatagcttgatcccaagaggcggaggttgcagtgaaccgagatcacgccactgcactccagcctgggtggcagagcaagactcggtctcaaaaaataaataaataaataaatgatggctgggcacggtggctcacaccagtaatcccagcattttgggaggctgaggtgggtggatcacctgaagtcaggagtttgagacaagcctggccaacatgatgaaaccctgtctctactaaaagtacaaaattagccgggcgtggtggcacatgcccgtaatcccagctactcgggaggctgaggcaggagaatcgcttgaacctgggaggcggaggttgcagtgagccgagatcgtgccactgtactccagcctgggcaaaaagaacaaaactccatctcaaaaaaaaaaaaaaaaaaaaaaaggataaaaaggatggtgctttgtggaggggaattctggagtaaatcttagggcgtggtggtcagtcaccacagcacatggtggatcccctgatccctccagccagtcccccaaagctgcctatgacaagggagaaatcctatcagcggaggaagaagttgctcccctacctcaaccccaccacagcctcctcaggggactttcctccacccaccctgttcccagcatcctctcctcctaggaggagatgccatagcaaaggcatacgggcctacaggacagagatcctgtaagggaatgactttctccccttacttctggggaactttcttgtctggtacctggaggtttcgggggatgagttccaaagtagccagaggtgaggagtgtgaagcccagccaattcctggggcagctcaactcctcgcaatcggagcaggtaggatcggccactgggaagagagggcagggctagaacccaagattctgccacccccagcctttatccccacccacccaaaccttttcagcttctcctcccagctgggatgaggcgaacacccagaagttccctagcaaagctttctgaactaaaacctaggatcatgggcccgcagtgagcctgaatgtttgaaactggggctgtgctggaaaacacagcacaggctgggtgcggtggctcacgactgtaatcccagcactttaggaggctaaggcgggcagagcagcctgcgccacacagtgagacctcatctctaaaaaataaatacataaataaataataagaaaaaaacaaacacagtacgtgtagggaccaatcctatggggattatgccctctgtgagttgtggacaggaggcagcttccaggtgagagggtgagggggctgtgagagaaggccccatgggagtcagtgcggggaggaagccacacttaagacgggactgaggtctggagacctggtcctagctacttttccctgtgtgaccttggggaagctgcttaactgagccaggcgttgcttggactgggggacctcagtccttgtggagattaagtaacatcataccctctgggacttcagaatgtgacacagtggctgggtggactgaggtggccctgtggactcctgcctcaccaccagggtcacagccataccttgtgccaggttctggagctcctgccttggccagaggaggtgagggtgtggctgctgctcgcccagctccacccagttgctatgactgtagaaatcctggtccggaggacaggagaaggggagtgaggcactagtctggcctttctcaccatctccagcactaatatgccactcctttgagttccccatcccgaaagtcccctcccacccctactgctcccaccagacaccccaagtcccctccactgccctctctccattgctcagagcagagctttgcccaggtggaaactgtcccagcatctcttcccagctcagagtctaacccaaggcctctctcggcctgcagagtcctgctgcgtgtgctgctccctcagctctctgacctcgcagccttcctctctcaccctcacttctctccagccacagcgccctccttgctgttcctacaggaagcactgccagcttggaggtggggaactgggacacagcctcggggcaccgcgtgccagtgcccaccccttccagagtggaggagacatgatcaagaaggcaccataggacgcgctccatcccggacaggcacggaagtgaagacccctctgaccatcaacccaaccctgttctcacctgcagggcatgaagtgcagccccgaggcgctggcgagccagggtgtggtcaagggccctggctgccaccacggtctcccgcagagcccctaccaggcgcgcgcgtccctgacccagtcgctcagcatcaaagtgcaggtcggggtcattcctggaagttggcaggaagtcctgggctgcattggcacgagacacctcacctaaggctgctcggaaccgccgagaagaaccaggtccaaagtaggcggcaaagaggtcatcagcaaggagtgttcgaccctggggagaatagcgggcgacggggctccagggaggccctttggattgactgttgcccaccttatctcagcaactgacactcaaggctgggtatgagggtcctgagccccacaaaggagggacagtcccggacctttctaaggagggggactcctaatttcaggaccaagactactgggtattattgctgcaggggtggggccatgggtgtctcttctcttggcaaccagagccctcaaggagtagaggccccatggaattggggactctggcaggggtgtgacaggaccctgggatgctcaccaggaagtcctcaagacgaagaggggggcggcctgggggtggctgctccaggaagagctgcagggtgacgttgagcgctgcctcctcagttaggtcttggtgggtgatggagccaggggcagccagcaggctccagatgttggggaagaaggcagatgtggggggcagcaacagctgcagcagaagcaacgctgaggggcccgggtgggattgggggacctccgtggggagcatggctgagacatggacctgggagacagaaggctctcaagggaggaggaagcagccgcgattccagggcaggccggctctgcgggtctccatgggaacctgctttacctcaaaagtcgtgtctgctccagcctggcttccccaccctctcgctgtcacccagacaacctgagggcctcatcggaccattagggacatacacacctgccaggagaggggtccaaggttcctcccccacgcccccctccccagtccctggctgcgtccccagccctgccgcagaaacactccccatgctcaggaagcctgagtcctctcaggccctcccctacctggttgctgggtctcctgggcagggctggcccgggcttgacgtcacagggcacttaggtcagagttataattaaccgaggctcagcagagggggaggaaggcctcaacagggtgggggaggacaggcaacccctggccctttcgctcctgcctgcccaaagccacaggcagcagcccacgccagggcgggcctcccttggctgcagtgcggaggtgagtgagagctggggaggaggaagggagtaagcagcgtgactcaggcctggcacagtgccagggacagacccagatagacgcacccctctgccctccagaaccagggcctcactcccaccctgcagcccccaaggattcaggcacccagcccctctgctcccctctctgcccccaccacagatgacaagaggattttgtgggaaaatattttattgctgccatccccatggtgagccgctgggggtgaggggtgaagctgggtggtggatcacagcatcttctggaatagggcgatggcctcatccaccttcctgagctctgcttctgtctgttggagctggagtggaaccagggggtgggtgaggacccaggtccaagtgaagagacccccaaacacccaggacaacaaagttgggaagatgagcgaggaccatgggaggtcagtagctcagaggaggcgtgaacctggctggcctggctccccacccattcccaccagcacccccacttccaccaccacctcttgggtcttgcctttttccaccaagtggtgagtccccaagaacaaaggaacctcagagcctacgtgttccccattcagtgtccccacctaagcaggagagcacagtctcccaggccggtcacttcatttgtcagatgatgatgatgatattgcccccctcccagggctcttgggagaaccaagtgagattaaccacgtccactcaaggctctctagctcttggcctccatgactggttttctctgtgtctgtgcagtttactccactgcttctctctggcggaacccaggaggcaggggacaaacaagactggccttccagggtcagcccagtaggcttgaaagtaagtggtgggaggcccagggctccccgactacatgtggaccccaagcccagccccaggcatgcaggtttccacattttgggcagctgggtggggtacgaagggtctggctgggagataggatgcctggttctaggtcagcctccgtctcccacctgttgtgtgaccctgggttgtgcccagcccccagctgctccccatgtgtaaggggagggccttctatggtccctgctcaaagcgcctgggctccatgctccccagtggattccccagggttgggtacagagtccagcttccagaccaggattggtttttgttttgttttgttttttttccagacagggtcttctctctgttgcccaggctcaagtgcagtggcatgatctcggctcactgcagtcttgacctcccaggctcaagcaatccgcccacctcagccccccgagtagctgggaccccaagtgtgtgccactatggccagctaatttttgtatttttgttgtagagatgggatttcaccatgttggctggtctcaaacccctgggctcaagtgatccacccaccttggcctcccaaatttctgggattacaggtgtgagccactgagccaggctgttttgttttttaaggctagtgggagtggagaaggaacaaagaaatctgtaactggttacgatcaattagttgtcaacaccactgcactcggaccagcccagaccagggttttgatggaggaaggggatggtgtgggaaatgcccacccaggccacacaccttggcttcatctgcctcctggacttcgagcggcaccttgacaggatagcccgaggcagcacggcgttcccgcagacgctgggcctgccgctgggcctcaactcgcttggcttgcagcttgcccagctcccgtgcagggtccaccagcccctgaagctgcaggtggatggagcagcgatcagaagccagagccacagcgcaaccctggggggcgggagcccccagggccagaacagccaccacacctgcgctggccagggcctgcacgtagcccgacaccgccgatgccagggcgcccgtggcctcatccgccacttccaggaaacctgccagggagggagaaaggtgaggcctagctccatggagacaggaaaccaagcagtcactgccggacactgggtcccagagtaggctgaggggacagtgggatggggcggacatgggggcctgaggctcacagtcaggccggatccgggtgaggttgtagtcggcccgcagggagcgcacggctcgcgtgatgcttagcgccagctcaagggcggcttctgcctcggggtccttccaggagcactgtggggtggaggagggggtgagggggcctggagggcaggtcagactcccctctccaggccatgccatacctctgagggctccgggtagggggtaacacagaggctagggggagcttgcggcatcctccggggcagcctctggaacagctcctccgtcacgaagggcatgaagggtgagagcagccgcaggccaacgtccaggcaagtgtacagggtctggcgggcacactcagctgccacctggtccaccccattcagtacaggtttcaggcactcctaggggacgagaggtacagggctcacggctggaggtctagccttgagccctcgctgtgcctgtgaggactgggaaggggatgggttggcttaggtctcaaggccaactctggcaaaactgagcccagggctctgctgcccacctgcccccaccatcccctgccccgctgtgctccttctcaccaagtagacatcacagagctcatagagccagaagctgtactgggcagtggtgacggccgggaagtcgtaggcctggaagccttgattgctgagcctcacagcctctgtcaggcggctgcggatccagcggtccaccaggctctcatggcctccgggcttggggagagagggtgtatcagccggcgggccaggggagggtgccagaaccccatgggggcaggagtcatgggcaaatcttcatccagagtctgatgagtccaaagcaaccacctatgtgccaggatctgggaagaagtgacaggccccagcccccaatgcgctgggctttccctttaactgtctgtctctgtgtctatctgtccccccagctacatggaggctgctccggacaggggtacagcctgtgtgagtgctgccagctttgctgcccaccaggcccttacctgggaggtgggtgagggcacaaaacccttcccaaggccacgaagggcaaacttggtggcattccagagcttgttgcagaagtggcggtaacccagtatccggttcacatccaggttgatgtcacgacctgggtcgggggtgagatgtgagtcctcatcaccctcttcccagcccatgcccaccagaggctcagggtggagaagagggatgggcctcacagaaggaggaaggagtggctgggagggacgctttgggggccataccctgggacatgtaggcacataatccaaaccggagagcatcggtgccacattcaggaatccccgctgggaagtcagctttctacagggaagaggcagggggaggagcgtcctcagccagccccatccacgctgtgctcctgcttagcccagcccaaccctccatacctgcccttctttggccttctccacctcgctgggatccaggttgctgttcagcagctggttgtggaggccctgagggtggagtgggagcagtcaggtggctgtgaccacagccccacggcccttcctggctggcccagcacccagcccacctgcagggagattccatagatgacatccaggggatcgatgacattgcctagagacttgctcatcttccggccgtgagcatctcgcacgatggcatggaggtagacctgcagagcaggtggggaggcccatgagactcagtcctctccttccccggcctcagtgccccgaccaggactgtgtctggtctaccccactgtgaacctcaggtcccactgagtgtccccaagagctcgttgagcgcctttatgtgaatcagaagcactccttcctctgggaagatgaagccctgggcacaggaatcactgagcagggcccaggctggatttcaaccccacaccagcccccgggtcaggcctgcccacagctaaccccatgccccagccacgcggggtctgcgctgcagcacaggacggtaggagaggaggctgggggcgatgggagggtctcggctgtctccgcacctctctaaagggcagcctgcccgtgagcttcaggcccagcatgaccatccgggccacccagaagaagaggatgtcatgaccggtctccagcagtgtcccggggtagaacacactcaggtcttctgactgagggcagaccagggtgtgaaggggagccaacacccaccctccagtcccctgtcccgccaagccccggccccaggaacacacctggttgggccagcccaaaatggataaggggaagaggccagaggagaaccaggtatccaatacatcctcatctgagagaggccaaaggtcagaggtcagagggagtggagctctgccccccacaactccctccagaccctcaaagccccgccttgccttgctggagactgatcttgtcaggggacactccgaactccttggctgccttctcccgggcctccgcctcattgcgtccactcacccagtaccgcccatcagggtcctgccacaggtgcagtgattacccaagggggtgtgtctgcttctggctcaccctgcccctccccccaccaaggacccagtaaacccaccactccagcagggtgtcccagcagctagctctggccctctgctcacctccccagggggcaccgctgggtcactgacagtgacaaagtaggctgggatgcgatggccccaccacagctgcctggaaatgcaccactccctgcaaatgtcggggaggagaaatcagggagggcctgatggagcctggcccgagtgagccctgctcagccctcggcaagcccctcccacactgaggaccctacacaccggatgttgtccatccaggcatgccatgtgcgctgatgggcctcaggcaggatgcggaggtcaccccgagtcacagcggcgctggcagcctgggccatctccccgcagcgaacgtaccactgcggccgcagcagaggctctaccacgtccttcgaccggctgggggtacacgtaggtgagaaggccaggcggtaaaaccctgaggagccctccatcttcctcccgtcccaggcccccaccctcacttgcaaagtggcaccaccatggggttgtcctcaatgccacggaacagtccccgctccttcagcgccaccagcaccgctttcctggcctcaaacctgggcaggccctgggtaggaatgaggcctcatcatggcgatgcccagccatccctccatctccctgacccgggcactcttgcctcaggcagcctcaccaggaaaggcggaggcacattgatgagggccccccgggagtccatgatgctgatggcctccagcccgtgccgctgcccaacttcatagtcattttggtcatgtgcgggggtgatcttcacagcacctgggtgtacatcaggatgcccaggtcatgagggactccacggagttccttcctacactcacctcttttgctgaaggatgtagctccgagaccactcctggcccccacttgtctaatacagtcccttgagaaccaccccaagctctgtctatttggctgaagcttattttctttttctctgagagaagatggacagctagggtgcagctccagtcttttcctctccccacaggaccagccccttgcccacctgtgccaaagtccatgtccacaaattcatcgaagacaatgggaaggctccgagacaggaatgggtggatcacgttcttccccttcaggtgctgggggcggaaagataccaaaaacgcatgaagcagggccagacgccgtgattcccacctgtaatcccagaactttgggaggctgaggtgggcagatcacttgaggccgggagttggagaccagcctggccaacatggggaaacctagtctctactaaaaatacaaaaaaaaaattagccaggtgtggtgacgcgtgcctgtaatctcagctactcaagaggctgaggcacaagtactgcttgaacccgggaggtggaggttgcagtgagccaagatggtgccactgcactctagcctgggcgatagagtgagaccctctctcaaaaataaataaataaataaaagcatgaaggggcctggtgccatggctcacatctctaacccccacactttgggaggctggggcaggaggcttccttgaggccaggagttcaagatcagcatggttaacagagtgagaccttgtctctatttaacttttttttttttttttgagacggagtctcgctctgtcaccaaggctggagtgcagcagagtgatctcagctcactgcaacctccgcatcccaggttcaagcgattctcctgcctcagcctcctgagtagctgagattacaggcacccgccactacaactggctaattttttgtatttttagtagagatggggtttcactatgttggccaggctagtctcgaactcgtgaccttatgattcacctgcctcagcctcccaaagcgctgggattacaggcatgagccactgtgcctggctatttaactttttaaaaatgcacgaagggctgggcccaagtccttcctttccagggccctgactatcccaacacttgaactcccccaaacagtccccaatagctctaccctcagagctgggaaagaagctgaagaccagtttctaacccagtttcctctcctcagccaggggcctaagtccaacccctccaccccataaggatgggagccctttttggccagaactccttccctaactgtggacagtcccccacctggtatctggtatctttggggtgcacagctacagccacatctcccagcattgtctcgatccgagttgttgccaccaccacctcctcgtcgctatctggggtgacagaaggccttgtggtcttggccttggccccttcctgccactcccagcccaggatcctggtgcccctggctcctacctgagccttggaccttataggcaaaggacacgaggaccccgaactccaccttctccttgtagccaggcacggagagcagggtgcgacctgtcagctccttcttatccacctgtaaaatgggtatttagaggcgtggcccaggggccagggccagggccagggtagattggagatggagacaggccaggttggggggcgcacctcaatgtcagagatggcggagttgagggtgcaggaccagttaacaaggcgggtactgcgatagatgatgccttcctcgtgaagccggacaaaggcctctgtcacagctgctgagagtttctggggtggaggagggagaagtcagagagatgggccttgtgcctggaggcccaggcagacacccagggctccagtgaggccttgcccatacagagtcccactggccagcacaaagacccctctgaggggagtactttccttctttccttgagggggagagaggactaagggaacacaagagcaggcaacaagccttgtaatgctgcagatggcgaggaagacaatcagctggggacaagtactggtgcagaggacactgggagttcaggctccatgggagacggggtcctgatcatgtgccatctggaggaatctggagctcccagagccaagacagggaacatgaagggccatgatatggaaagggccatggcgaggggtgggaagtggcatttgcagctgagccctccatggtgttttacatgggccagctcctgagagagggccacaacacctctgctttctcctgtgggggtcccaccctggggagactcctactcctgccccagctttgacactcctcccacgcacagggtccatggtgaaacaggctcgatcccagtccaaggagctgccaagcttcttcaactggtggtaaatccggtcacctttcctggaagcagacaggctgaggtcagcactcgtgcctgggctagagggagacatcaggtggctgactgggcagtgtggagatcacccatccccctgaaatttacctgggccctagagccaactgactctgcctctgtgggagggtctgaccctgtggccaaggggttacaggtgacagaggtcttctggataggggacagggaggcagggctgcgatgcccacagggatgctgcatactcactcctccttccacttccagacttcctgtagaaaggcctcgcggcccagctggtgccggctcagtccctgctcacgccatagcttcttctccaccaccacctgggtggcaatacctgcatggtcacagccagggttccacagggtggtctccccacgcatgcggtgcctgttagggggcatggaggaccagagggtgagccaggccagtggggcctggcaccaaagaaagcagaggcttcaggcaaggagtcagtggactaaataaagaagcagggaggccggacgcggtggctcacgcctgtaatcccagaactttgggaggctgaggtgggtggatcacctcaggtgggggagttcgagatgagcctggccaacatggtaaaaccccgtctctactaaaaatacaaaattagctgggcatggtggcatgcgcctgtaatcccagcactttgggaagccgaggtgggtggatcacctgaggtggggacttcaagataagcctggccaatatggtaaaaccctgtctgtattaaaaatacaaaattagctgggcgtggtggcatgtgcctgtaatcccagctacttggaaggctgaggcaggagaattgcttgaacccgggaagcagaggttgcagcaagctgggatcatgccattgcactccagcctgggtgacagagtgagactccgtctccaaaaaacaaacaaacaaaaaaagaaagaagcaggggtggagctggaacccttgtgattctaaagctagtcaaggagaaaagatttgaaggaagagccaaggcaatatggaaaaagaacaaagacaggcatgcgtggtggctcacacctgtaaccccaggactttgggaggccaaggcgagtggatcacttgaggacaggagttcgagaccagcctgaccaacatggcaagaccctgtctctaccaaaaatataaaaattagccaggatggtggtgcatacctgtaatcccagctacttgggaggctgaagcacgagaatcgcttgaagctgggagggggaggttgcagtgagttgaaattgtgccactgcactccagcccggatgacagagtgagactctgtctcaaaaaaaaaaaaaaaaaaaaaaaaaaagaacgaagaggaggctcctgccaaacaggatagcaaaagttctaattgttaaaataagttactaaacaggaacaaaatagtacctggaaacagatacaagcaaatttagtgtttgtgaaagttggcacttcctatcagtaaaataaggataaactattcaaaatgtttgaaacaactagctaattatttggaaaaaatctcccccttaccaatagtcacaaaaagaaactttagatagattaaagaattcaagccaggcacagtggctcaagcctataaccccaacactttgggaggccaaggtgagaggactgcttgagcccaggagttgcagactagcctgggcaacatagtgagacctagtctctgcaaaaaaaaaaaaaaaaaagccaggcatggtggcgtgcacctttgttcccagctacttgggtggctgaggttgaggctgcaccaagctatgattgtgctgtgatcatgccgatgcactccaatctggccaacacagtgagagagactctgtctcaaaaataaataaataaacaaataaataaaaataaaaagttgatataactctattccattaaagtaatgggagtgtctcacattttatttaaaccacgttcactggaaaaaaaatgtggctaccttaagagttttataagaagtatgtggccaggcacagtggctcacacctgtaatcccagcactttgggaggccgaggcaggcggcttacttcaggttaggagttcaagaccagcttggccaacatggcaaaactctgtctactaaaaatgcaaaagaattagctgggcgtggtggtgcgtgcctgtagtcccagctactcaggagactgagacacaagaatcgcttgaacccaagtggttgaggttgcagtgagacgagatcgcgtcactgcactccagcctgggcgacagagcgagactctgtctcaattaaaaaaaaaaaagtagtcattctgttttcatgtaaacaaacttggaggccaggtatggtggttcatgcctgtagtcccagcactttgggagactgaggcaggaggattgcttgagcccagaagttcaagaccagcctgggcaacatagcgagaccctctcttgattttattaaaaaattgaaaaacagggccgggcgtggtggctcacgcctataatcccagcactttgggacgccgaggtacgcgaatcacgaggtcaggagatcgagaccatcttggctaacacggtgaaaccccgtctctactaaaaatacaaaaaaaattagccaggcgtggtggtgggctcctatagtcccagctactcaggaggctgaggcaggagaatggtgtgaacctgggaggaggagcttgcagtgagcagagactgcgccactgcactccagcctgggtgacagagcaagaccccatttccaaagaaaaaaaaaaaattgaaaaattgaaaaaacaaaaacgcaaacacaaacgcaaacaacttggccattgtatgttatgtgtatttaacagaactgttggctggacgaagtggctcatgcctgtcatcctagcactttgggagaccgaagcgggaggatcacaaggtcaggagctcgaaacaagcctgaccaacatggtgaaaccccgtctctactaaaaatacaaaaattagccaggtgtggtggcatgcgcctgtaatcccagctactcagaaggctgaggcaggagaatcgcttgagctcaggaggcagaggttgcagtaagcgcgcatcactgcactccagcctgggaaaccgagagagactctgtctcaaaaaaacaaaaaaaacaaaaaaaaaaacaggccaggcgcggtgggtcacgcctgtaatcccagcactttgggaggccgaggtgagcagatcatgaggtcaagagatcgagaccatcctggccgacagggtgaaaccctgtctctactaaaaaaaatacaaaaaattagccaggcgtggtggcgggcgcctgtagtcccagctactcaggaggctgaggcaggagtatgctgtgaacctgggaagcagagcttgcagtgagccaagattgcgccaccgcactccagcctgggcgacagagagagactctgtctcaaaataataataataataataaaaataaaaaaataaaacatataactgttttcctagctctcagttacttgcaaaatgcacaatcaaacattatattcccagtgctcagagcagaggtggcacatagttgggcccagtaaatattttttgaccacattaatttagtacataagacaccagaaaaaattctcaaaatttaaatataataaaccctggtttccaaaaatggtaaagttattttaaaatactttttaaaaagatttgtcacctagaatattactttgtatttatcactaattaaaatattaacagtgaaaacaaatagtaacagaaaacaggagaaacatttacaattaacaggaaaactaccacacaataatacaacaaaaacatttacaatatttaacaaaaaaattgatacccagaacaggtaaagaattctcaaaaaaaaaattaaaaagaaaaagaacgaagaatcaatagaaaaacggggaaaagatagatacagacaattcacatatgggtaaacctgactggccaaaaaacatgaaaataggcacaacttcaatagcaatcagaaaggtacaaagtaaaacaacagaggtatttttttgcccatcagattggcaaaactaattaggcaaccctaatgctcaggcttagcaagggtggggaaatgaacactctcacagcaattcctggaggtatcaatcagcaaagccattctgcagggcaacttggcagcttccgtttgtacttaatataggtgtgcccctgccgacctagcagtttcacttcttgatagctacaccagcgaaacccttccacacatgcttcagcaagcatatagagcaggggtatccaatcttttggcttccctgggccacatggaagaattgtcttgggccacagataaaatacactaacactggctgggagcagtggctcacgcctgtaatcccagcactttgggagtccgaggcgggcggatcacgaggtcaggagatcgagaccatcctggctaacatggtgaaaccccgtctctactaaaaatacaaaaaaaaaattagccgggcgtggtggtgggcacctgtagtcctagctacttgggaggctgaggcaggagaatggcgttaacgtgggaggcggagtttggagcttgcagtgagccgagactgtgccactgcactccagcctgggtgacagtgcaagacccgtctcaaaaaataaataaataaataaataataaaaataaatttaaaaaaatacactaacactaacgatagctgatgagctaaaaaaaaaaaatcgcaaaaaaattcttaaatgtttaaacaaagtttacaaatttgtgttaggctgcattcaaagccgtcctgggccgcatgtggcccacaggctgcaggttggacaaacttgatatacagggatgtgcattagagtaaggttttcaacagaaaaaaaacaaaaaacaaaaaacagaatgaatcattaattaaaaagtgactccaggccgggagcagtggctcacgcctgtaatcccagcactttgggaggccgaggcaggcagatcacctgaggtcaggagtttgagaccagcctggccaacatggtgaaaccccatctctactaaaaatacaaaaattagccaggcgcggtggcaggtgcctgtaatgccagctacttgggaggctgaggcaagagaatcgcttgaacctaggaggtggaggttgcggtgagccgagatcatgccactgtactccagcctgagcaaaaagagtgaaactctgtctcaaaaaaaaaaaaaaaaaaaaaaaaaaaaaagaatgacttcactatggtacagccacactatgagatattatggaacaattaaaaagaaggaagtcagtatgtgtggtatgtgtgtaaggacaaggaaagatctccaagagaaagtattaagtgtaagaagaaagctagatcataacaagtgtaatatgaaccctttatgttaaaaaatagaaaagactcacccaaaaggagaactataaatttctatgggtacgtgtatatgtaagtaaataggaaagatctgggaagatacacatcaaagtgataacaatggctaaatcttaggaggaagtaggtgtggagggggatggtcaaggagatttgaaactttaaatttcttacaagaatatattcatatattttggtcagttgtggtggcgcattcctgtaatcccagctacttgggaggctgaggcaggagaatcacttgaacccaggaggcagcggttgccatgagccgagatggcgtcactgcactccggcctgggcaacagaacaagactctgtccccccaaaaaaaaatatatatattcatatgttcctaattaaattcaaaataatgttattgttactagaaaaagaagggagagactgggtgtggtgcctcacacctataatcccagcactctgggagtctgagacaggagaatcacttgagccaggagttggagaccagactgagcaacaaagtgaaaactcatctttacaaaaaattaaattaaattaaattaaaattaaataaagaaagaagggatagaagagagtctgcaagtggcggtgttgcatgggagtactggactaggagaggaagctaaatgatcagattggaatgacagagagaagtgtagcaccactgggggcagaagtgagcaccaacccagaaggagagaggctcggggggctgtcagggaaaaggagagagccagactaggcagagggaaccagaggaaggtgcagatagaagctcaccatcgagtcagggagtcctggatggcgttggtgagtgcatggcccaggtgcagggagcctgtcacattggggggtgggatgcacatcatgaagacacctcggggatttgctgctgacacattaggacgctgatggtggagaaggatggcacatgtttaaggcctcaggtcacctctcccagcccctcccaggcaacacatccttcagtcctgcccttccccaccccacccactctgggcctgggcagcagtgcctactcaccccatactctggcttgaagaagccctgctgctcccaccaagggtaccaggcagcctccacataccgagggctgtaggagtcgggcatggggccactgacatctgggggagaggaagggagggctcagtgccgtggctgggagcactctgggaaggagacgtgctggcagagagggatcgggatctccgtcactcacatcataggacaggcatttgaggggcctagaggcagggcagggggtctgcaattcctcaccaaacaaagtggtgagagcaagaatagagcaagatagggtgaaaacttagaaggggctgctgaggggtgagccccttcccactcctagtacctttcttttccccgggtggggttgggaggtcataggtaatgaccccaggatcccgtttctccctcttctctggttttggtttcttctgcttgggagggagaagacataggcccaggcatcagccaacccatcaccgcacacatcaactttccttccagctccaccctcgcctcacctcccctggaggtggctgctgctgttggatcttctgcttctgttggaatttctctagcttctcccgtttctttgcctctttcttgagctgagcagctgtctttgggagggcaggagcctcggggcctagagagaggtgcagaaattcagactcagccagctggggaccctcttggacggccatactaggtttcagatggggtattttagatgcccgaggtcttgcccatgctgacctcccccctctccctcctctcccgcaggaccctgccccagtgattctgccatttctaggaaaaaaagaaagtgagttgcatggaaggccccagggaagcccctatcctccaactcctcgcccttcctcacctggctgatgagagagaggcctggctcctgagtatagaaccacttctcctagcacggctcggaattctggctgccggacacacgtgacaaaccagcgagtcacattattccagatccggcgggcaggtgggtctaggacctggaacaggaaataaatgactcttctcagtcaccctacagtgaggtctgaggagagcagtcttgttcttccccaggcctggtgactcacgtatcggaaaggcagcagcaaggctgtgacagccgccaggtcagccagagtgggggcctccccggccaagtaggtgtgcagccgaagccactcctccaaggggctcagggccctgcccagggcccccagcacagcctggcaggaaggggaagaagtgtgagacaaggtttggcccacctccatctcccaccacaacccaatccatgtggcctccctccaccccactctcacaaatcaccacctctgagtcccatttcttcactcaaatagtcacaataaaaatacttctgggcggatcacgaggtcaggagatcgagaccatcctggctaacatggtgaaacctcatctctactaaaaatacaaaaaaaaaatagccaggcgtggtggcgggcgcctgtagtcccagctactcgggaggctgaggcaggagaatggcatgaacccaggaggtggagcttgcagtgagccgagatcacgccactgcactccagcctgggcaacacagcgagactccgtctcagaaaaaaaaaaacaaaacacttctgactcatccaacaaatccctactcaatacttatgtgttagatgcaatatgttaagcatagaagtaaagattatatgaggcatctcaataactgccaggttcagaacatcaataaatatgtattaagtacttctccagggaatgagaggaaaacacgaacagatggacagaaccctgacctggtagagttaacattcttgtaggggaacaacaaatgagcaaatataaaatgaagtgccctatttttcttaactcctatgaagaaaaataaagcagaatgaggggaacaggggccaggcgtggtggctcacacctataatctcagcactttgggaggccgaggcgagcagaccatctgaggttaggagttcgagaccagcctggtcaacatgacaaaaccccatctctactaaaaatacaaaaaattagccggacaaggtggtgggcgcctgtaatcccagctactcagaaggctgaggcaggagaatcgcttgagcagtgagctgagatcgcaccatcgcaccgtggcactccagcctgggcaacagaaggagattccgtctcaaaaaaaaaaaaaaaaaagaaaagaaaagaaataaaagaggggaacaaacagggaattccagaagagagggactctattttatttgtttgtttggacagacattctgaatgcaaggactctattgtagatagggtgatcacaatatgagggagcaagtcagggtctgccacattcattcatccattcaagaaatactaattttccatcatgtgctcaataccatgcaaggaggcagagttgaaagtacaccaaggcacaggtctcctttggaaggactgatagttacaatctggcagggttatctctcctctcacttaccttcctcatttcatttctcttttatctcctcccagcaattgtcatctctccctcacccagtcttttcctacaattcaaataacttctatcctcatcaatttcagactcatcaaacttttactaagagactttaaaagtgcctggcactaaactatgtgctctgcgcacatcttttaatcctattaactcagtgaggcaagcattacatcaacttgcctgcgtgttcatagacataggaagaccaagacacagcgggtctatgaaacgtgcccagggttaccataccagttggcaatctgggatttgatcactcttttcccacatctgatgtactaccttcttgtctcattgtccattccagtcctcgcttccctcctctgaatttctcccctccccctcttctgtacaaccccctcacctgggggtcctgggccgagcttcggagtcccagggccggcagcgttgctccacaggcagctggtattaactccgtgtcggcgtaactgacccactgttggacaaggacagccgcccggctgccccctgggccccccaggcctgctggccacagcagctgggccacagccgtggccccccacacccagagcccaccgggcccctgctccagggccggcaggcggggtgggggaaagggagtcctgctagtcgggggtggctggagacagatgcgggggtgggctcctccccatccgggaccctccccagcctccccatagcgagcggctatgagggctcggaggctggggaaggcatctgggtgaggggagacgtagagggtggacatagttatgagaaggtccgaacgaagtggaaaaacctaaggagaaagagagacaggggaagactgcgggatcgaggtgggtcctatgtttgagtagagaggggaccctcacgggagctccttcgccgcagacacccgagtcccataggactgagggtctgaccaggcaggctgtcaggagccgaggacctggctctcagaggggcagtgtcagtggggagttcctggggaagaggaactatccaccatcgcggggcttcggggagtgtggaaggctctcaggagcgggtcggcgtctggttggatgcgggttcgagccgcgtgtacgtactggagggagatggtcagactgggccgggaatccacctcacagccaggcgccggccgcggctggaccggccgagcggcccgggcggaggagtcgagcgggcagagacggtgggcggctctccaggtgaccctagttccctaagatcgccgccccggcagccggcgcccacgtgttcccccctttgtgacagggagcgtttccgggcctgcgggtcctggcgggggcggccgtgccccgcctgcgagtgcgcgcccgccgtgtccgacactgccccgggggccgcgcggctcgccgcccgccggtctcacgaggaacagcgcggggcgcggggcgctgggcgcggacgcaggacgagaggacacccctgagcacgacgctcccgtcaggcgccgccacgggcaccttgtgcgggtcctcggccgggtggcgagggcggcgcccagcgggcagctagggaactggcccaagagggtcggccggccctgccggtggagggcgttccccacccggtagcggggaggtgcccagcagggagccgcctgatgaggaccgaaggggaggtccatttgccgaggccctggcgtccagcttcctctttgagcctcatctcctcatgtatcaaaaaagggtgacggccgggcgcagtggctcacgcctataatcccagcactttgggaggccgaggtgggcggatcacctgaggtcagaagttcaagactagcctggccaaggtggtgaaagcccgtctcacgcctgtaatcccagcactctgggaggccagggcgggtggatcaccaggtcaggagttcaagaccagccaggccaagatggtgaaaccccgtctctactaaaaatacaaaaattagccaggtgtggtggcaggcgcctgtaatcccagctaccccggagcctgaggcagggaattgcttgaaccctggaggttgaggttgcagtgaactgagatcgtgccactgcactccagcctggcgacagagctgcagtatttgtaaaaatacaaaaattagccaggcgtggtggcacacacctgtaagcccagctacttgggaagctgaggcaagaagatcacttgaacctgggaggcggagattgcagagctaagatcacaccactgcagtccagcctgggtgacaaagtgagactccatctcaaaaaaaaaaaaaaaaaaaaaaattagccgggcatggtggtgggcatctgtaatcccagctactcaggagctgtggcaggagaatcgcttgaaccgggaggcggaggttgcagtgagccagaccaagccagtgcactccaccctgggcaacagagtgagactcccgtctcaaaaacaaaaaggagggtcacactagatggtctctaagggtcccttaaggctgagaagtctcatctgtatcatgaactcatatttgctgaatgagtgaatgaagtttagtaattcccagtcacaacttttctctaaaatataaattacatcacttgtatttatcttctatacatattcagaaaacatgaactgatttggttggattggtgaagtctggtagcatgaaatgtatcttacgacactatcacattaatggaaggacagcaagcactccagttgcaggtatggtataagcaaaaggccacagggagaacatacaggtagggacatgttggggaaacatggtgtagagcaactgtattatatgctttataccaaggagagtagtgggaagctgagttggattcttggctgggttaacgcagagtaacaggggcttggatgaattcgacatccttttccatgtcccagccccctgcccaacacatagtaacagaaccaaaacacaaatttgcatcataaattttattcccgatgcgggacagattccttccatccccaaatgaatcacatgctgccctggaaagacctaggaaactctcctaccatctccagagaagtagtgagaaaggcaggtgctggggactgggaaggctttgaagtttcccagcctacttatcctccccttctcaagagaggatagctgttccctattactcctctcatccactcatcccttaaaaaaaacccacaaaaccatcattagtaaaaaaacaaaaccccttcaagtattgggggttaggggttctgggctgggacttggggttatgggtcaccaatgaaagagggaggggaagaggaggaggagccatcactgtttctgctgcagggcttccttccttgccgcatcctgtagcaactgtgtgtcgacctcatctgctggcagctgcacgtatcggaccactgagccccgaatgaagcagttcttcactgataactagacaaagatggacaaatatgaaaacacccttaaaaatgtcctctaaccacccaggggcctcctgctttagaggtgtttcctcttctccacagaccccaactcaccatgtgagggtatttctcagggtctgtgacactgatgtcagttagtttgatgttgagatactaggaaaggaagatgaacaccattattattattattatttttttttgagacaagagttttgctcttgttgcccaggctggagtgcaatggtgccatctcggctcactgcaatctccgcctcctgggttcaaatgattttcctgcctcagcctctcgactagctgggattacaggtgcccaccaccacgcccagctaattttttgtatttttagtagagacggggtttcaccatgtttgtcaggcttgtcttgaactcctgacctcaggcctcggcctctcaaagtgctgggattacaggcgtgagccaccgtgcctggccgacgaacaccattattaaccctagagacatgatgtaagaacccaacccttaagtctcccctctccttctccaggaaccaattctggggcccgtgctatatctcacctgatccacagaatggagggttccacagatgctgtcaagggcagagggagagaagaatcaaattagtttataacaaagtcaacatagaggtgacttcagagctgggatgagaacatgactgggagaagtcaaggacttgaggatgtcagaaaaggtagaaccaaaagggggcattcctaagccctggagtaggaaagacaactaacagagtagtttattttcaaccccacatctcctctccctaaaccaatccattctttttttttttttttttttttttgagatggagtctcactgtcagccaggctgaagtgcagtggtgtgatcttggctcactgcaacctctgcctcccaggttcaagcgattctcctgcctcagtctcctgagtagctaggacttcaggcgcatgccatcatgcccggctaattttttatttttagtagagatggggtttcaccatgttggccaggctgttccttaactcctgatctcaggcgatctgcccacttcagctccccaaagtgctgggattacaggtgtgaaccactgtccccggccaaaccaacctattcttaacagctaccattaaacaactggtaaaggctagacctgtattctatatagtatttgtaatctttacagccatctttcaaagtagttattaccttccaggggctcagagaggttgttttaaactttatgagtttagaacaaatgggaacttcagtccaagtctgtgtgactcccaaaaccatcagctattttttttttatttttgcgacagggtctcactctatggccaaggctggagtgaaatggcgtgatcatggctcactgtggccacttgagtagctgtgattacaggcttgagccaccatgcccagctgatttttttttgagatggagtctcgctctgtcggccagtctggagtgcagtggcacaatctcggctcactgaaagctccatctcccaggttcacgccattctcctgcctcagcctcccgagtagctgggactacagatgccggccaccactcctggctaattttttgtatttttagtagagacggggtttcaccgtgttagccaggatggtctcgatctcctgacctcatgatctgcccacctcagcctcccaaagtgctgggattacaggcatgagccaccattcccgactttttttttttttttttgtagagaaagggtctcactgtgaatgtcacccaggctagctattttcaaacatttattgctttggaaccagagcccatatgtggataaaggtaggtagcattactcttgatgatgcaggcatgagtgatgtcctctccattccccaatcctcgagccccttgaaatgctatttgaggaatgctatcaaaacaccagtgctctttgagagaatggtgcaaaaatttaaaaaaacagcctttggctgggaatggttgttcacgcctataatccaagcattctgggaggctgaggcaggaggatcgcctgaagccagctggagaacagcccagacaacatagcaagacctcatctctattttaaagttataaaataaaataactgtggccgggcacggtggctcacgcctataattccagcacttagggaggacgaggcgggcgaatcacgaggtcaggagttcgacaccagcctggccaacatcgtgaaaccccatctctactaaaaatacaaaaaattagctgggcatagtggcagacgcctgtaatcccagctactcgggaggctgaagcaggagaatcacttgaacccgggaggtggaggttgtagtgaggcgagatcgagccactgcactccagcctgggtgacagagtgagactccatctcaagaaaaataaataaataaaaataatcgtaataaatagcagttttaaaaacgtccttatcttgccaaaaataaagttggcagttctctgccccaatttttgtaaaattctgaaagtctttaaaacccagcgtctaggccatgtgcggtggctcatgcctataatcccagaactttaggaggccaaggtgggcggatcacttgaggccaggacttcaagaccagcctggccaacacggcgaatccccatctctactaaaaatacaaaaattggccgggcgtggtggctcacgcctataatctcagcactttgggaggccgaggcgggtggatcacgaggtcaggagatcgagaccatcctggctaacacggtgaaaccccgtctctactaaaaatacaaaaaattagccgggcatggtggcgggcacctgtagtcccagctacttgggaggctgaggtagaaaaatggcgtgaactgggaggcagagcttgcagtgagcggagatcacaccactacactccagcctgggtgacaaagcaagactccgtctcaaaaaaaaaaaaatacaaaaattagctgggcattgtggtgtgcacctgtaatcccagctactcaggaggtgaggcacgagaatcacttgaacccaggaggaaaaaaaaaatttaaaaataaaatataaaaatacaaagattagctgtgtgtggtgcatgcctgtagtcccaggtatacaggaggctgaggcacgagaatcatttgaacacaggaggtagaggttgcagtgagccaagatcatgccactgcattccagcctcggtgacagagtaaggatctgtctcaaaaaaaaaaaaaaaaaaaaaaagacccacttaaatatgctctaggaaattaatttaaatgaactagtactaggcaatcattattttttttgagacagagggtgagtctctgcctaataacaaaaacaaaaacaaacacccagtatctgaaacccactgcctcagtaatgttctcaccatattgctagctgctgaaaaacatttgacagcaccccaccatctccagcagtgaaataacatttgggaattgtacaaagtggtgtcattttattaagtcccttaaggagggggagatacatagcacaaaagtggtctgacaacaaacataagagaaagaacttttggccaggcgtggtggctcacacctgtgatcccagcactttgggaggctgaggcaggaggatcacttgaggtcaggagtttgaggccagcctggccaacatggtgaaaccccatccctactaaaaatacaaaaaattagctgggagtggtggcatgcaccggtaatcccagctattcgggaggctgaggtggaagaatcacttgaacccaggaggcagaggttgcagtgagccaagatcgcgccaccgcactccagccagggcaacagagtgagaccctgtctcaaggaaaaaaaaggagaaagatcttctttctcatcccaacagaaaagtcactttaaagccacacacatattggctcacacctgtagtcactgcactttgagaggctgaggtgggaggatcacttgagtccaggagttcaagaccagcctgggcaacacggccgagactctgtctctatgaaaaattttaaaaataatataaaaaggccgggtgcagtggctcacgtctgtaatcccagcactttgggaggccgaggcaggtggatcacgaggtcaggagttcaagaccagcctgacgaagatggtgaaacccgatgtctactaaaaatacaaaaattagccaggtatggtggcaggcacttgtaatcccagctacttgggagactgaggcaggagaatcacttgaacccaggcagcagaggttgcagtgacccgagatcatgccactgcactccaacctgggtgacagagtgagaccccatctcaaacaaaaataaataaataaatagaaaaaaaagaaggctgggcgcagtggctcacacctgtaatcacagtactttgggaggccgaggtgggcagatcacaaggtcaggagattgagaccatcctggccaacgtggtgaaaccccttctctactaaaaatacaaaaattagctgggcgtggtggtgcatgcatataatcccagctactcgggaggctgaggcaggataatcacttgaaccagggagtcggaggttacagcaccactgcactccagcctggcgtagactcgaccagagcgagactcgtctcaataaaaaaaagaaaaaagaaaaagaaaagaaatgttactacggccgggtgcagtggctcacacttgtaatcccagtactttgggaggctggggtgggcagatcacgaggtcaggagttgggagaccagcctggccaacatggtgaaaccctgtctctactgaagatacaaaaaatgagccaggcgttgtggcgcatgcctgtaatcccagctaccagggaggctgaggcaggagaatcacttgaacccgggaggcagaggttgcggtgagccgagatcacgccattgcactccagcctgggcgacagggcaagactctgtctcaaaaacaaaataaaataaaaaaaataaaggtactttagggcctagggttataacacaacagttaggcttcccatgtaaaaggcccaggaaggagaaaagaggagaatcaaaaacaagtcatcacaccaaattgcctaagactgatagtgattaccgtacttgtcttgctctgtggccccaatctatacacatcaatatcacttgcattgccagtgctacaaatggaaacctgtgttctaaaacgcaaaggcccttaagtccctctcctcaccattccctgccctgtcaacgtgtaacccatgaaaaaattatctcacatagaaatgtggaagacagccagacacagtggcacacacctgtaattccagcactttgggaggccaaggtggcaggactgcttgagcccaagagtttcagactagcctcggcaacacagtgagactctgcctctccaaataattaaaaaattagctgggcatggtggcatatagccccagctattcaggaggctgagtgagctatggtggtgccactgcactacagcctggacaacagagtgagacccccatctcaaaaaaataaatgtggaagacgcttttgggaagagaatacaattgatcccatctttctaaaggataatgaggtaacaggtatcaatattttaaatgtactttttttttttttttgagatggagtctcagtctgtcgcccaggctggagtgcagtggcctgatctcagctcactacaacgtccgcctcccgggttcatgtgattctccagcctcaggctcctgagcagctaggattacaggcgcacaacacaacatctggctaatttttgtatttttagtagagatggagtttcaccatgttggccaagctagtctcaaactcgtgacctcaggcatccacccgcctcgacttcccaaagtgctgggattacaggtatgagccaccgcatctggcctaaatgtacatattatttaaaggactgtacagataagtacagggccaggtgtgctggctcatgcgcgtaaccccagcactttgggaagctgaagcaagaggactgcttgaactcaaagaatttgaaaccagcctgagcaacaaagtgaggcactgtctctaatttttaaataaataaatattattttaagaaagaaagtaggactaggcgcagtggctcacgcctgtaatcccaacactttgagaggctgaggcaggtggatcacaaggtcgagagttcaagaccagcctggcctagatggtgaaactccatctctactaaaaatacaaaatttagccgggcatggtggtgggcacttgtaatcacagctactagggaggctgaggcagagaattgcttgaacccaggaggcagaggctgcagtgagccgagattacgccattgcagtccagcctaggtgacagactgaaactccatctcaaaaaaaaaaaaaaagaaagaaaaaaagctggacagaatcatatttcagttgtgtcacttactagttttgtagacttgaacaagtggtatagctgatctaagcctcagtttcctcgtgtaaaacagcaatagtatatattacttagcagtgtttgagaaatcaatcaataaatgtattcagaatagtggttagtcaatacgtcttcggatattatttttctttctttaagcacctatcatataactggcctatgctaggtattagatacactacatggtttcaccatgttggccaggctgttctcgctctcttgacctcgtgatccacccgcctcagcctcccaaagtgctgggattacaggcatgagccatcgtgcccagcctatggcctgttcttttttttctttttttttttttttttttttgagacggagtcttgctctgtcacccaggctggagtgcggtggcaccatcttggctcactgcaagttccgcctcccaggttcacgccattctcctgcctcagactcccaagtagctggaactacaggagcatgccaccacgcctggctaattttttgtatttttagcagagacagggtttcaccatgttaaacaggatgatctcaatctcctgaccttgtgatccgcctgcctcggcctcccaaagtgctgggattacaggcgtgagccaccgcgcccggcctggcctgttctttttttgagacagagtcttcctctgtcaaccaggctggagtaaagtgatacaatcatggctcactgcagccttgacctcctgggttcaagtgatcctcccacctcagcctcccgaatagctgagactacaggcatgtacactacacctggctaattttttatagaaatagaggtctcatcactatgttgcccagactagtctcgacatcctggactcaagtgatcctcctgcctcagcctcccaaagtgctgagattacaggtgtgagccaccatggccagcctagtacttactttttttttttttttgagacagaatctcactctgtcacccagctggagtgcagcagtgtgatctcagctcactgcaacctctgccgcccaggttcaagcgattctcctgcctcaccctcccgagtagctgggattacaggcaccagccaccgtgcccggctaatttttgtatttttagtagagacagggtttcaccatcttgaccgggctggtcttgaactcctgacctcgtgattcgcccaccttggcctcccaaagtgctgggattacaggcatgagccacacgtccagcccgtgagccactgcgcctgacctgtatttactctttaaactatatattgctttgtattgttttccaatacacgatacaatctctaagcttatctgtaaatttaaggcacaaggcatttatttattgctaaattttaaaatttttcttagagatggggtcttgctctattgcctgggctagagtgcaatggagtaatcactgctcactgcagcctcaaactcctgggctcaagctttcctccttcctcagcctcccaaagtgctgggattacaggcttgagccactgcaccctatccatttatttcttctgtacatcttccacctcgcctagccctgaaatatttctcaaattaaagaggttccagggccctgggcacacccacccccaacagacttgttggaacaggtacctacctcaggtcattctttagttccacgaccacatccttgcccacaagggacttgaaaaaagaatagaagagctattgggagagagggggaaaaccatcatgtgggaaggagcatggtagggaggagtgtcctttgacagtattaccaaatactggtattgtgaaccccactgcatccctgacagttctcaaaatttcacaggaaagaataattggttgacagagctgaaaggctggagcccaaattattctgcacactgcactgagcccatcacttaaagtcccagagagactctgccctgcatacgtcggcctccccactgtgctctctcagtcgaccacctttctcgggtacctgcccactcctttcaatgaattgtagaaaatatcccacccgcaccctgccgaagcttgcctggcagagaagtgctctgaggtctaacttttccgtctcccgctatcctcactgaatctctctcagggttggggttttttccctcatcatggaaaaaatatcccatttgttctcagtgcctcctcaatgaacctgagaaacagtacagtactaaagatgaagataaaaactccggacctaactccagcctaggggtacaaaggccagatcccccgccccaaccatgcgaggtccccgagggcgcccccttttgacgtcacggtacccaccatggtgctggcgccgcgggcagcgggccggaccgggaagacagcagggtgctgcgagcaggtctggggaaaccgaagcgcgagcccgcgcgtggggcgaggcgggaccgcgcaggcgcagcgggaagcgacgcagaaagctccaagcgctgacgggcaaagcgcggccgacttgcggctggggagcgcaagctgggtagagtagaggggaggaggaagccgggaaaggggcggggtttccttcattccgacttcctccctggccggccggctcccattgcgcaggcgcggaccctagcctgggctgccagacgggtggcgggactcagcgcctgagctcaaaggattttgttcttttccagaatcctgccatctacagcgtgatgtgtttgtgccctacacacacttcctatcgagaattgtggggagtttgttaagattatgaagtgtgcacttttctatatttgttaaagtaaaaacataaaatttaaaaaataaaattaaaaaatgttttgaatcttaaattcagctgataaaaagaaaaaaaggccgagggccgtggctcaagcctttaatcccagcactctgggaggcctaggtgggtggattgtgtgaggtcaggagttcgagaccagtctagccaacatggtgaaaccccatcttcactaaaaatacaaaaaaaattaggcgtggtcgcaggctcctgtaataccagctactcgggaggctgagggaagagaatcgcttgaacctgggaggcggaggttgcagtgaaccgagatcgcgccactgcactgcagcctgggcgacagagcaagactccgtctcaaaaaaaaaaaaaaaaaaaaatgaccgggagcagtggctcacacctgtaatcccagcactttgggcggccaaggcaagtggatcgcctgaggtcaggagttcgagaccagcctggtcaacatggcgaaattctgtctctactaaaaacccaaaaattagccgggtgtggtggcacgcgcctgtaaatccaggaggcataggttgcagtgagtggagatcttgccattgcactccagcctgggcaacaagagcaaaactccatcccaaaaaacaaaaaatgttgaggcctgtaaatcccagcatttggggaggctgaggcaggaggatcatttgaacccaagagttacagtgagctacaatctccccactgcattccagcctgggtgacagagcgagactctctctagaaaaaagaaaattataaacaaacaaacgttgagcagtcccagagataaggaggagctggagcacaaattttgattttatcaaaggttaccaataaatacatttctccaaaggagccaacctcaatctccgcatttcttacacacttttgccaagactgtcctgtaaaggactgtgtaaaactaaagagactgtggctcacagatacaaataacccagtctaacatttcactgttaaatgtttcaaacacaaacagacagaaatgcagttacatattattctaactcatatcccccaggtttttataaatatgtattaggacacaggtaaaagaaaaaaatgtttttgagatggagtctcgctctatcaccaggctggagtgtggtgccacgatctcagctcactgcaacctccacgtcccgggttcaagcgattcctctgcctcaccctcctgagtagctgggactacaggcacgcatcaccgtcctcagctaatttttgtatttttagtagagacggggtttcaccatgttgggcaggatggtctcaatctcttgacctcatgatccgcccgcctcggcctcccaaagtgctgggattacaggcgtgagccactgtgcccagctggtaaaaatattttttcatggactgagacttcataaaacttgtatttgtcatcttgcatagacatacttatttgtcaagagtttgttatagaaatattttctggggctgggcacggtggctcacgcctataattccagcactttgggaggctgaggtgggtggatcacctgaggtcaggagttcagaacagcctggtcaacatggtgaaatcccatctctactaaaaacacaaacattagccgggcatggtggtgagcgcctgtaatcccagctactcatgaggctgaggcaggagaatcgcttgaatctgggaggcaaagtttgcagtgagccgagatcgtgccattgcactccagcttgggcgacaagagcgaaactgtttccaaaaaaaaaaaaaaagaaaagaaatattttctccatgtaatggatgtaaacaatgaactctgtgagtgcatagatgctgaatctcctggaccttacctataagtgacatcaggacatcaagcaggatttgtccctccacccccagttgagtcctaaactccaaaaccagcttgtaactgattaaaagcagttatagtttgccatctgttccatctgtgctaaaggtgtctgaggatcaaaaattatgtggctgattgaaacaatgagttcatgggccgggcacggtggctcacgcctgtaattccagcactttgggaggccgaggcgggcggatcacgaggtcaggagatcgagaccatcctggctaacacagtgaaaccccgtctctactaaaacaatacaaaaaattagccgggcatggtggcgggcgcctgtagtgccagctactcgggaggctgaggcaggagaatggcgtgaacccaggaggcagagcttgcagtaagctgagattgtgccactgcactccagcctgggtgacagggcgagactgtctctcaaaacacacacacacacacacacacacacacacacacacacacacaaaatgagttcatgaaaattcaaatactttacccttaccaatttaatcattcacagtgacctcacaatcagagaacacatgctctctccatgaactctccccttcaaggtacattcacagcctaaataccagaagtaattttctttacgaacaaatttactgattgacaaataagcatccacacaggaagaagaatgttagggtggctggaaataacagacattcaaatacatcacacggtttaaagaggggcctagttttcctgagtccattccaaagtcagaaacaggatgtgagggagtgtgataggtggtgcatgagactccttctccagaatttccaagggatggtaacttagattcaggtctggtcaagaataataatgatgtttgaagatgaggggaatgaaatacatgtagaggcatcctaggatgcttcagttctaaaaagaattaatctacttcttcaattgtggggcctgtggcaggccttccaggcacataccctgttccgcaggcaggcccagtgcatcctccttggtagagttttgtgatgatagggttacacatctgctccaattcctttctcttatgatcaaactcatctttctctgccagttgattgacctccagccacgaaaggagctcgttgcatttatccaatattttatttttatcagactcactaatcttgcccttcaaaccttcatcactcacaacactcttcatgttaaaagcataggattctaaggcattctttgcagcaattttctccctctggacctcatcttcagctttatatttctcagcatccagaaccatgcgctcaatctcctccttgctcaggcggcccttgtcattggtgatggtgatcttgttcaccttgccggtgctcttgtccatggctgtgacattgagaataccattggcatcaatgtcaaacgtcacctcgatctgaggaactcccctgggtgctggagggattccagtcaggtcaaaccgccccagcaggttgttgtcctttgtcatggccctctcgccctcatacacctggatcagcaccccgggttggttgtcagagtaggtggtgaaaatctgtgtctgcttggtggggatggtggagttgcgctttatcagggcagtcatcacgcccccagccgtctccagccccagggacaggggagccacgtccagcagcagcaggtcctgtaccttctcagacttgtcccccatcaggatggctgcttgtaccgcagccccatatgctacggcctcatcagggttgatgctcttgttgagatcacgtccattgaagtagtcctgaagcagccgctgcaccttggggatgcgggtggagccccctactaaaacaatgtcatggattttagccttatccatcttggcatcccgaagcgctttttctacaggctccagggtacccctaaacaggtctgcacacaactcttcaaatcgagctctggtgatggatgtatagaagtcaatgccttcataaagtgaatcaatttctaggttggcctgggtgctggacgacagggtcctcttggccctctcgcaggcggtgcgcagccgcctcacggctcgcttgttctggctgatgtcctttttgtgtttcctcttgaactcctccacgaagtggctcacaagcctgttgtcaaagtcctccccacccaggtgagtgtccccagcagtggcctttacctcaaaaatcccatcatctatggtcagaattgacacatcaaatgtgcctccacccagatcaaaaatcaggacatgtcgttctccttgacctcctttatctaaaccataggcaatggcagcagccgtgggctcattgatgattcttagcacattaagtccagcaatcacacctgcatccttagtagcctgacgttgagagtcattgaaataggctggcacggtaatcactgcattggtgacagggtggcccaaaaaggcctcagcagtctccttcaacttagtcaataccatcgaagagatttcctcagggtagaaagctttattctcccctttgtaggacacaaggactttgggcttgcctccttcattaatcacttgaaaaggccaaagtttcatatctgcttgtacaacaggatcattaaatttcctgccgatcagacgtttagcatcaaaaacagtgttctggggattcattgctacctggttcttggccgcatccccaatgagccgctcggtgtctgtgaaggccacgtagctgggggtggtgcggttgccctggtcgttggcgatgatctccaccttgccgtgctggaacacccccacacaggagtaggtggtgcccaggtcgatgcctatggcgattcccttggcagtagccatggttctctgaggcctatggagaaagaataagatactgttttgggagagtgcttttcaatgttatttatttttttgagacagggtcttcctctgtcacccaggttggagtgcagaggcgcagtcatagctcactgcagctttgatctcctaggctccagcaatcttcctgccttagcctccagaataactggagacaacatgcccggctaattttttttttttttgagacggagtcttgctttggactgcagtggtgtgatctaggctcactgcaacctccacctcctgagttcaagcgattctcctgtctcagcctcccgagtggctgggattatgagggcaccaccacgcccagctaatttttgtatttttagtagagatggggtttcacggtttcactatgttggccaggctggtctcaaactcctgacctcaggtgatccgcccgcctcggcctcccaaagtgctgggattacatacgtgagccaccgtgaccagctctctgcctggctaatgttttaattttgtgtacagatggggtctccttatgttgctcaggctggtctcaaactccttcagggctcaaacgatccttcagccccagcctccccaagtactgggattacaggagtgaacatctcgcccagcctattttttattttttattgtggtaaaatacatacaaattgtaccatcttaaccatttttaagtgtagagtttggtagtgagttcaatcacagcggtgttcaaccaatttccagaattctgttcatctcgcaaaactgaaactgtatactcattaagtaactcccgttttcccctccctttatcgcctggtaacaaacatttttttttctcattttttagagacagggtctcgttttgtcacgcaggctgcactgcagtggtgtaatcatggctcactgcagtcttgacctcccaggctcataggatccttttgtctcagcctcccaagtagcttggaccacaggtgaatgccaccacacccagctaattttttatttttttgtagagaccaggtctccctgttgcccaagctagtttctcactcctgagctcaaggaaacctcctcccacctccaagtcaccaagtgttaggattataggcttgagccaaggcgcccgacctcttttttctatctctatgaatttgactactcttgtaacttcatataagtggaattatacagtatttatccttttgtgactttgcttatgtcacttagcttatgtgcacaggtttcatccatgttgtaacatgtcacaatttccttcctaaggctgagtaatattcatatttatataccactgtttttgattttgttttgagacagagtctcactctgttacccaggctggagtgcagtggcatgatcttggctcactgcaacctccacctcctgggttcaagctaattctccagcctcagcctcccgaggagctgggactacaggcgtgcactgccacgcccagataatttttgtatttttagtaaaaacagagtttcaccatgttgaccaggatggtctcaaactcctaaccttaagtgatccgcccgcctcggtctccctaagttctgggatggcaggcatgagccaccaccgcacccggcctatatacattttgcttatctatctctcgatggatacagattacagaatttacagaataatgttgctatgagcaagcctatacaaatacatggagacgctactgtcatggcagactgctttttggacagggtagacaaaagtattctcagctactcaaagaagttgggaagcaagtagctgtatattgttttcaatttcccaagtgacctaattctactgtcctgttcctatatattttactgtgggattctgtctctttatgacccaagagtagtgtacattctggtctcttcaagagacatcagcctccacacttgagttctgctgccttcctgggataatattctctattaggggttcaccggcagtaaattccagtcaggctgaagatgactgctagaaaaccacaagccttccagttttctcaaacgacatggcactccagacagtatctgtatccttctcctaaataaaactcctgttttctggagccaataactgatcaataaagggtttaagggcggggggcggtggctcacgcctgtaatcccagcactttgagaggccgaggcgggcggatcacggggtcaggagaacgagaccatcctggctaccatcctggctaacacggtgaaacctcgtctctactaaaaaatagaaaaaattagctgggcgtggtggcgggcgccagtagttccagctactcggatggctgaggcaggagaatagcttgaacccgggaggtggagcaattagccgggcgcggtggcgggcgcctgcagtccctgctactcggaaggctgaggcaggagaatggcctgaactcgggaggcagagcttgcagtgagccaagatcgtgccactgcactccaccctgggcgacagagcgagactccgtctcaaaaaaaaaaaaaaattaaaaataaataaataaaaataaaataaagggtttagtgtctatccctctccacaccgcagattcctaggccgcactccctttcccccgcttcccagttaccccgcctcccccttaccccgccttccccgcctccccatttccccgacaggccgcactcccttcccccgcctcccccattctggctgctccgaccaatcaatctgaagccatcttagctttccccaagtgctcctcctacccggatcagccaacgcccacatacctcaggcttaaaccaactagggaactttccagtactttcccaaacaaggacctactgagcctttcaggttcacaatcaatcagatccctactggctcacctagtctcccgacgccttcgcttcagtttggaaacgtccagattacgcagccccagcgagtaggtgggggctccctcaatatcaaactgcacaaccggggtccccccaccccccaccccgtccctccctgcaaatttgagacggctccaactcagtaatctttttccaaactggcccatgaggtcagagacagtatctccattgtaacgtggccgggcggtgtcaacacaaacgcccccaccctcccctggacgcgcgtaacccgctccccgcaccagccccctgcccacaactgcgcaggcccagcaagcccccacaattaaaagcccagcgccgacccttcctgtcaattaggcgctgaagcgcaggcggtcagcatcgccatggagaccaacacccttcccaccgccactcccccttcctctcagggtccctgtcccctccagtgaatcccagaagactctggagagttctgagcagggggcggcactctggcctctgattggtccaaggaaggctggggggcaggacgggaggcgaaacccctggaatattcccgacctggcagcctcatcgagctcggtgattggctcagaagggaaaaggcgggtctccgtgacgacttataaaagcccaggggcaagcggtccggataacggctagcctgaggagctgctgcgacagtccactacctttttcgagagtgactcccgttgtcccaaggcttcccagagcgaacctgtgcggctgcaggcaccggcgcgtcgagtttccggcgtccggaaggaccgagctcttctcgcggatccagtgttccgtttccagcccccaatctcagagccgagccgacagagagcagggaaccggcatggccaaagccgcggcgatcggcatcgacctgggcaccacctactcctgcgtgggggtgttccaacacggcaaggtggagatcatcgccaacgaccagggcaaccgcaccacccccagctacgtggccttcacggacaccgagcggctcatcggggatgcggccaagaaccaggtggcgctgaacccgcagaacaccgtgtttgacgcgaagcggctgatcggccgcaagttcggcgacccggtggtgcagtcggacatgaagcactggcctttccaggtgatcaacgacggagacaagcccaaggtgcaggtgagctacaagggggacaccaaggcattctaccccgaggagatctcgtccatggtgctgaccaagatgaaggagatcgccgaggcgtacctgggctacccggtgaccaacgcggtgatcaccgtgccggcctacttcaacgactcgcagcgccaggccaccaaggatgcgggtgtgatcgcggggctcaacgtgctgcggatcatcaacgagcccacggccgccgccatcgcctacggcctggacagaacgggcaagggggagcgcaacgtgctcatctttgacctgggcgggggcaccttcgacgtgtccatcctgacgatcgacgacggcatcttcgaggtgaaggccacggccggggacacccacctgggtggggaggactttgacaacaggctggtgaaccacttcgtggaggagttcaagagaaaacacaagaaggacatcagccagaacaagcgagccgtgaggcggctgcgcaccgcctgcgagagggccaagaggaccctgtcgtccagcacccaggccagcctggagatcgactccctgtttgagggcatcgacttctacacgtccatcaccagggcgaggttcgaggagctgtgctccgacctgttccgaagcaccctggagcccgtggagaaggctctgcgcgacgccaagctggacaaggcccagattcacgacctggtcctggtcgggggctccacccgcatccccaaggtgcagaagctgctgcaggacttcttcaacgggcgcgacctgaacaagagcatcaaccccgacgaggctgtggcctacggggcggcggtgcaggcggccatcctgatgggggacaagtccgagaacgtgcaggacctgctgctgctggacgtggctcccctgtcgctggggctggagacggccggaggcgtgatgactgccctgatcaagcgcaactccaccatccccaccaagcagacgcagatcttcaccacctactccgacaaccaacccggggtgctgatccaggtgtacgagggcgagagggccatgacgaaagacaacaatctgttggggcgcttcgagctgagcggcatccctccggcccccaggggcgtgccccagatcgaggtgaccttcgacatcgatgccaacggcatcctgaacgtcacggccacggacaagagcaccggcaaggccaacaagatcaccatcaccaacgacaagggccgcctgagcaaggaggagatcgagcgcatggtgcaggaggcggagaagtacaaagcggaggacgaggtgcagcgcgagagggtgtcagccaagaacgccctggagtcctacgccttcaacatgaagagcgccgtggaggatgaggggctcaagggcaagatcagcgaggccgacaagaagaaggtgctggacaagtgtcaagaggtcatctcgtggctggacgccaacaccttggccgagaaggacgagtttgagcacaagaggaaggagctggagcaggtgtgtaaccccatcatcagcggactgtaccagggtgccggtggtcccgggcctgggggcttcggggctcagggtcccaagggagggtctgggtcaggccccaccattgaggaggtagattaggggcctttccaagattgctgtttttgttttggagcttcaagactttgcatttcctagtatttctgtttgtcagttctcaatttcctgtgtttgcaatgttgaaattttttggtgaagtactgaacttgctttttttccggtttctacatgcagagatgaatttatactgccatcttacgactatttcttctttttaatacacttaactcaggccattttttaagttggttacttcaaagtaaataaactttaaaattcaagtgatgccttttattcctttatttgggggtcagtagggtctgcataggttgtttttcccatagcgtctaaaatggaatggcatttttgcttccagtaagggcagattttgcagaggtgtgactattgtaatgtgatccatttgtgttagacaaatggtatcctccagtaaagcttcttgattctggccaggagtggtggctcaagcctgtaatcccagcactttgggaggctgaggtgggcggatcacttgaggtcaggagttccagaccaacctggccaatgtggtgaaaccctgtctctactaaaaacacaaaaattagctgggcgtggtggtgcgtgcctgtagtcccagggaggctgaggcaggagaatcgtgtgaacccaggaagcagtggtagcagtgagccgagatcacgccattgcactctagcctgggcatcacagcaagactccgtctcacacacacacacaaaaaagtaaagtttgttgatgctgattgggtttagcctgagggtacagaaaaagtttaacacctgggagggtagccttaaagtgatgtttgtgtaagattggtctcaaaagaggtgggaggggggcggggatgtttctgcaaaagtggtcaaaaagaatgcagttagatgggaggccagcgctcctacctcctgtaggtacacctgatatgctcatggacttgatacttaatctagattcaacatggaatggaaggagtgtcctaaatttcaaagtgaaaaaacgggtacattcactggcttgctgagttatacacatgtgctttagttgtcatcttttaaaatggaagggtttggctcgatgcctctctcatgactgaaagcatactgaaatagaaatgtcacattcttagcagttatcacctacaatttaagtacgccagtgagcacccgggccaggaagacctacagacttcactcccatgcactttcccttggagatgcttcatgccccagccgctagcatcctagaagtaattccctcctccttggaaaacgcccactacaatccttaaagctcccggagtgagcccttttaaaaatgaattgtatctggccgggcgtgctggctcatgcctgtaatcccagcactttgggaggctgaggcaggcggatcacctgaggtcaggagttcgagaccagcctggccaacatggtgaggaccccccccaccacccacctcctgcactaaaagtacaaaaatcagccaggcgcgatggtgtgcgcctgtaatcccagctattcgggaggctgaggcaggcgaatcgtttgaactcaaaggcagaggtttcagtgagccgagattgcgccactgcactccagcctaggtgacagagcgagactccatctcaaaaaataaaaattgtgtcggccaggcgcagtggctcatgcctgtaatcccagcactttgggaggccgaggtgggtggatcacctgaggtcaggagttcaagaccagcctggccaacagggtgaaaccccatctctactaaaaatacaaaaaattagctgggcgtggtggcgggcacctataatcccagcaacttgggaggctgaggcagaagaatcggttgaacccaggaggtggatgttgcagtgagccaagatcgtgccattgcactccagcctgaacaatgagtgaaattctgtctcagtgaataaataaataaatagtatctaagggcgatgaaaatgttttggaaccagagttgacggttgcataacattgtaaaggtcaaggctgcagtgagccatgactgtaccactgcactccagcctgagcaacagagtgagaccctgtctctaaaaaaaaaaaaaagaaaaaaaaatcaattgtatcaatattacattaaagcactttatgagcttatgtgtacctcaaagcccatcaaaccattcactaaatacttgttaatgaagaaaatccagtgttatgggaaatgatacataaaggtagaccttgctttggaagtttgaaaatagaaaataaatatgaaatgcttaggtttccaggccagtctacagaggaacatttatctcttatggtagttaaactgtagtactgtggactctggccacaatgtaaatcaatcttcatgggaatatgcctttgctataggacctcctctccccttcagagctgcagtagcatttgtgactctgatctgcagaccctgtagtgactctaaaccaggagcaactaccactactgtggcatggagtggggaaaaaggtaattggaaaagggtggagatggggaaggacctaccaaatgcctttgttgacacagtagagaagtcatcagacataacattgaatggaggcaataagagagttcctatggccctatcaagcttattagtaggtgttttaacaagaaatatgtaaaaattattacttgtcggccgggcgtggtggctcatgcctgtaatcccagcactctgggaggccgaggcgggtggctcactaggtcaggagttcaagacaagcctggccaagatggtgaaaccccacctctactaaaaatacaaaaattagctaggcgtggtggtgggcgcctgtaatcccagctactcaggaggctgaggcaggagactcacttgaacccgggaggtggaggttgcagtgagccgagatcgtgccactgcactgcagcctgggcgacagagcaagactccgtctccaaaaaaaaaaaaaaaaaaaaaaaattgtttgcctgcataccctagcacagagtactgtaccttgaaatattcactttgtaacctcaagaaaagacgttgagggagctgtggaattagcaaagagaatgcagtgccacccataaacggagtgatgttttgaggagcagaggaactttgagggaggaaagtgcaacaggaaaaataactgcaggtgtggaaaaacaaatataaatatcttctcaattccaatcacctcctaccttcctataccaggcctcagaaggcagcaggctatgataataaatttgattttatatggctttgaacccaggattttattttataacatatacacttactgttattcctggtcttcaagagttcttgtcatcctcaaaaagacaaaaaaggtaccaaaacaaaaaattaactacagtattttatagatgtgagagaagtgggcagaaataatacggctttaggctaaaaaaggaaatgaggttatttcttgggggagccaatattggcgatttctgagggagcgatccttacgtgaatataaaaaattgtgacagccaccattcctcctgctaactgatctaaatccatccccttgggaaacgcccctgaggtatctatcaggtgtagttcagccagagggagtaaacccaccgggccctcgtcctttcctagcaccaccatttaaagggatgtttgaggggtagggcagcggagcattccagacacggagttaaacccgccccaccccgctggcccacgtccagcccgatcaagaattggaggagagaggagcagggcgtggtggcgcgggcctggagtcccagctacccgggaggctggggcgggaggatcgcttgaggctgcagtgagccgtgattgcgccactgcactccagtctgggcgacaaagcgagaccctgcctcaaaaaaaagtgaaaaaaaaaaaaattagaagggagggcaccagaggagggctggagcaggttcacaggctgggactacggaggagcccagcaaccgagaatcactcctgagggtctaattttcttactctcctgatgcctcacggggcgagggactagaacggggcgctgagctggctgtaggcaaaagccaaccgactccatcccctactctcccatcagtcgcgcgtccccgcgcagacgggtgcgcgctggccgtgggcggtggggaccttctcttctcgcctctggccacccaatgcatctgatttagttgtatgaaagttacaaaattctccaatattttcgtcttgtaaatcacctagtatgagagaaactcgaaaggtcctttctttcctcctttaatccctttttggaaaaaaaaaaacatcagaaaacgcaggagtcggataggcagccccgaagccagccccgccctcaggccccagcggccccgccttttctccccccgcccccccccccgcactccccacctttcctcccctttggctgaggctttttcccccgtcgctggctctgcccgaagtttctagagttttctgaccttcaaggcgagaactgctgtgtcattcttagggacactccccaacaaactgcgccacccgagtctctccctcctctcgccagccggccctaaaacatcaaggttagtcaggactctatatttaacgtccggaagattctgtgaactatatgccaaccttgccctagtaacggggctcccccctcctttcccctctttctgcttgagcaatctgttctatcggaaaggagaggcagggctgggagagctggaaggtggggaaggcaagagcttgtaggggccatggtcttgagtccgaagagcagagcagcagccaggacgggagtccctggctgatcacatacccgtggtgcccttaatgctcgcagaggccaacactgtattcatttgttttcctctttagagaataaaacaattaggtctaaccacaaaattaaaagcaaacaaaacccagttaggttgatgagccaatgtgggaaggagtacaaaatgagtgtcagaacccgtgggtccaatcaccggttctgtaacctgtcatctgggtaaccagatcaagccactgaacttctttgatccttggtgctgtctttgaaaatgaaaaggtttgactgaatggcctgtgcccgcagatcttaggacagtttttacattaagctgaaagcagctgtagtcctaataatggtccccaacttttaaacacctaaataagaatgactacgagtcatatccgagagtatgggatccccaataaaaggagggagaagatcatattctctttgatcatgtagggaaaaaaaatttttttattcgagacaggatctctgtctcccaggctggaatgcagtggcgtgatcatagctcactgcagccttgacctcttgtgctcaagcgatcctcctgcctcagcctcccaagtagctgggactacaggcacctgccaccacgcccagctaacttgtaaagtttttagtagagatggtgtcccactatgttgcccaggctgatcttggacttctgagttcaagtgcctgccttggcttcctaaagcactgggattaccgacctgagtcaccacacgcagttcagttattgttaattatgttttagagatgaacacgtcgaaacttgtgttatttagtcaatgtacaagtacttccttgttgaaaagaaaaacagcctcaccaaagaagtagagcgcagatgcaaatccaggattttcccttcccagattttttctttccatgctgctagaaatggccagggttctctttgtcattgaagcatttgtcattcattcagttaagaatgcctgcctctagatttcatatcaattaactcttttgctttcatttaagttcatttggataaacttaaaattataacagcttttttttttaatttattatttttttgagacagagtcttgctctgtcacccagactggagtgtagtggtgcgatctcagctcactgcaacctccacctcccaggttcaagtgattctcctgcctcagctcctgagtagctgggattacagatgtgcaccaccacgtccggctaatttttgtgtttttaggagagaaggggttttgccatgtttgccgggctggtcttgaactcctgatctcaggtgatccacccatctcggcctcccaaagtgctgggattacatgcatgagccatcgcgcccggcctataccatcttttaaaatgaacaaaattaagaaaactactgtttgaggaactataaaaaggagagggagaaggaaggaaaagaccctgcagcgtcagcctgaagaaggctgtcttaccccacactgctgtagcaattatgttcttggcactccctcttcagttctcttgtccctttgaaagcatctaacctggctttcactttggggactctgagctctgatccttccaaacacagaatccaataaaaacctaattctgaaattaatcacattaaagttctgaaaaatctcctggggttcttatatattcaccttagacagcaattaaacttgtgactggatttctgccttgggaagcatccagtctgaaaggaaagaaaaggccggcgtggtgcttcatgcctgtaattccagcactttgggcggcccagacgggcggatcacttgaggtcaggagttcgagaccagactggccaacatgacgaaaccccctctctactaaaaatacaaaaattagccaggcgtggtggtgtgcacctgtaatcccagccactcaggaggctgaggcaggagaatcgcttgaacctgggaggtggaggttgcagtgagccaagactgtgccattgcactccagcctgggcgacagagcaagactctgtctcaaaaaaaaaaaaaagaaaaaaaaaagaaaattcaggtgaccctctccttgtcaggaaatggacaaggaatatgtatgtgtgggtttccagtctagtccacagaggcttcacttaaaagctaggtcaactatagcactgtagactctgactagtgtgactgattgaagaaaaacagcatttatattggatttttctgctatccagagagcacccaagatttggggtcccaacaccacatctacttgctaggcagttgagacagtgatgccctttgcttcatgccaatagagaggttttttctccccctctcccaccccccactccccactttttatgtttctcagcagaatcagagaagtattttatttttgagaaggagtttcgctcttgttgcccaggctggagtgcagtggcgcgatctcggctcaccgcaacctccgcctcctgggttcaaatgattctcctgcctcagactcccaagtagctgggattacaggcatgcgccaccatgcccaggtaattttttttttttttttttttttggtatttttagtagagaccggctttctccatgttggtcaggctggtctcgaatttctgacctcaggtgatctgctgcttcggcctcccaaagtgctgggattacaggtgtgagccactgtgctggccttttaaattgtggatttggaaggagggaaggaatgaatccagacctgccagtagtagcagttgatggtgaggaagtttccagagggaggggtgaggttaagggtctctggaagtgttgatacactgtgcagctaagatgaacatagtttgggagaatctccagccagacatttcatagagaaatgtttgggaaaattcctgaagtttgaccggtttgactagtttagagaggtgattcattagggagctaaagctgaatgtgaaagttatcacctacctgcacatacagacacacacatattgttaaagcaatttatttgcaacatgagtttagatcagtgaattataaacaaatgaatacccttaaattccaggaagaggtgttttgatagtggacaggtgtgtgtgtgcaggtgtgcatatgaaaagtgccaattgagcaaagtgtttaaaaacaggattattccttcatcagtaacttcttcctttcatttgtgctcaaggaatatcgccatggcaatgaggctattttttttttcttttcttttttttttttgtggtaggttgtaaacacagtactattgcttcaaccccctcacattttcctttcagacgcctaacaaagggtcttgcattcacactaagaatgaaggaaaaaaacaaagggaaagtaaattactaaatgcaaccgtatttaaaacaggaggaaggagaatccgcaggaagttggaatctaggataaaaacttagacacattcagcctggccaacatggcgaaaccctgtctctattaaaaatacaaaaattagcccggcgtggtggcacatcctgtaattccagctattggggaggctgaggcagcagaattgtttgaaccccaggggcagaggttgcaatgagcagagatctcaccactgcactccagcctgggcgacagagtgagactcagtctcaaaacaaacaaacaaaaacaacaggccgggaatggtggctcacgcctgtaatcccagcactttgggagcccgaggtgggcggatcacgaggtcaggagttcgagaccagcctgaccaacatgggcggatcacgaggtcaggagttcgagaccagcctgaccaacatggggaaaccctgtctctactaaaaatacaaaaattagccaggcgtggtggcgcacgcctgtaatcctagctactcaggaggctgaggtaggagaattgcttaaacccgggaggcggaggttgcagtgagccgagatcacgccactgcactccagcttgggcgacagagcgagactgtctcaaaacgaaaacaacaaacttaagacacataacctgaggtgttaagaggagctagtaactagaacctgggtcccaacccctcctgctttccagcatcactccacacagtttgcttaaagagggccacctgccaaacagctgtagtatgtgatgttaaagagagctaaacaccccccgcacctccctcccagggtcaccatcttgttaaatttgacctaaaaacggtaacagcctaggggtttcagggacagacagaaaatcttactcgggactgtgaggtcctacttctacacactgtccaggagtgaaccaggaattgagaaagtaggaaggaggtgtcccagaccccaagctaggaatggggagggaaatggaggaatcccaaatgccttaaggacggcctacatactaaggaaaatttttttctaactcctggttgcagctgaggggagcggctgagggcggggacaggggtgcggcggacccactgctcccattacccgaccagcgcctcccttcctccttggatgggtgcccctgtcttgctaagaactgcctgtttacacaactgctttccttgtgaaaatttaaaggctcctattcccagttgttctatccttgtaggttaaagattatgtcaaaaactatattgcattatctctttccttctccttcccattaagacggaaaaaacatccgggagagccggtccgtttctcaggcagactaggccattaggtgcctcggagaaaggacccaaggctgctccgtccttcacagacacagtccaatcagagtttcccaggcacatcgatgcaccgcctccttcgagaaacaaggtaactttcgggttctggttgtctccaaagtcatccgaccaatctcgcaccgcccagagcgggcccttcctgtcaattacctactgaagggcaggcggccagcatcgccatggagaccaacacccttcccaccaccactccccctttctctcagggcccctgtcccctccagtgaatcccagaagactctggagagttctgagcagagggcggcaccctgccctctgattggtccaaggaaggctggggggcaggacgggaggcgaaacccctggaatattcccgacctggcagcctcatcgagcttggtgattggctcagaaggggaaaggcgggtctccacgacgacttataaaagccgaggggcgcgcggtccggaaaacggccagcctgaggagctgctgcgagggtccgcttcgtctttcgagagtgactcccgcggtcccaaggctttccagagcgaacctgtgcggctgcaggcaccggcgtgttgagtttccggcgttccgaaggactgagctcttgtcgcggatcccgtccgccgtttccagcccccagtctcagagcggagcccacagagcagggcaccggcatggccaaagccgcggcgatcggcatcgacctgggcaccacctactcctgcgtgggggtgttccaacacggcaaggtggagatcatcgccaacgaccagggcaaccgcaccacccccagctacgtggccttcacggacaccgagcggctcatcggggatgcggccaagaaccaggtggcgctgaacccgcagaacaccgtgtttgacgcgaagcggctgatcggccgcaagttcggcgacccggtggtgcagtcggacatgaagcactggcctttccaggtgatcaacgacggagacaagcccaaggtgcaggtgagctacaagggggagaccaaggcattctaccccgaggagatctcgtccatggtgctgaccaagatgaaggagatcgccgaggcgtacctgggctacccggtgaccaacgcggtgatcaccgtgccggcctacttcaacgactcgcagcgccaggccaccaaggatgcgggtgtgatcgcggggctcaacgtgctgcggatcatcaacgagcccacggccgccgccatcgcctacggcctggacagaacgggcaagggggagcgcaacgtgctcatctttgacctgggcgggggcaccttcgacgtgtccatcctgacgatcgacgacggcatcttcgaggtgaaggccacggccggggacacccacctgggtggggaggactttgacaacaggctggtgaaccacttcgtggaggagttcaagagaaaacacaagaaggacatcagccagaacaagcgagccgtgaggcggctgcgcaccgcctgcgagagggccaagaggaccctgtcgtccagcacccaggccagcctggagatcgactccctgtttgagggcatcgacttctacacgtccatcaccagggcgaggttcgaggagctgtgctccgacctgttccgaagcaccctggagcccgtggagaaggctctgcgcgacgccaagctggacaaggcccagattcacgacctggtcctggtcgggggctccacccgcatccccaaggtgcagaagctgctgcaggacttcttcaacgggcgcgacctgaacaagagcatcaaccccgacgaggctgtggcctacggggcggcggtgcaggcggccatcctgatgggggacaagtccgagaacgtgcaggacctgctgctgctggacgtggctcccctgtcgctggggctggagacggccggaggcgtgatgactgccctgatcaagcgcaactccaccatccccaccaagcagacgcagatcttcaccacctactccgacaaccaacccggggtgctgatccaggtgtacgagggcgagagggccatgacgaaagacaacaatctgttggggcgcttcgagctgagcggcatccctccggcccccaggggcgtgccccagatcgaggtgaccttcgacatcgatgccaacggcatcctgaacgtcacggccacggacaagagcaccggcaaggccagcaagatcaccatcaccaacgacaagggccgcctgagcaaggaggagatcgagcgcatggtgcaggaggcggagaagtacaaagcggaggacgaggtgcagcgcgagagggtgtcagccaagaacgccctggagtcctacgccttcaacatgaagagcgccgtggaggatgaggggctcaagggcaagatcagcgaggcggacaagaagaaggttctggacaagtgtcaagaggtcatctcgtggctggacgccaacaccttggccgagaaggacgagtttgagcacaagaggaaggagctggagcaggtgtgtaaccccatcatcagcggactgtaccagggtgccggtggtcccgggcctgggggcttcggggctcagggtcccaagggagggtctgggtcaggccctaccattgaggaggtggattaggggcctttgttctttagtatgtttgtctttgaggtggactgttgggactcaaggactttgctgctgttttcctatgtcatttctgcttcagctctttgctgcttcacttctttgtaaagttaagttgtaacctgatggtaattagctggcttcattatttttgtagtacaaccgatatgttcattagaattctttgcatttaatgttgatactgtaagggtgtttcgttccctttaaatgaatcaacactgccaccttctgtacgagtttgtttttttttttttttttttttttttttgcttggcgaaaacactacaaaggctgggaatgtatgtttttataatttgtttatttaaatatgaaaaataaaatgttaaactttttcttgtctgttaatatgtgaagataatggatatttgcggagggatagtgtctgaataccatctatctttatagtctgaaaagaacagtactgctgaagagttatacgtgtaggagttagagctacacatatttttgtttgggcttaattgtgggccttaagagaaattgcaggtgcccgtcttgattagagtggggcttgtttcagggaaaagtcggatggcagctgcaaaacggtattggaggggtggttgaggtgggttcactggggcggggaggggaggggtggtgctgagatgggattatggtggttttctctccctcttctacttagtgagcggagtccacaaaaaaatgctgactttttttttttttttttttgagacggagtctcactctcactcttgtcgcccaggctggagtgcagtggcgcaatctcagctcacggtaacttccgcctcccgggttcaagcgattctcctgcctcagcctcctgagtaactgggactacaggcgcctgccaccacgcctggctaattttttgtatttttggtagagacagcgttttaccgtgttagccaggatggtctcaatctcctgacctcggctcatattcatttatatgtggaatctaaacagtagaactcagaagcagagaagtggtggtcaccaagggctgtgggatgggggaatggggagacgtgcaagggaaacaaagccttagtcaggagaaataaattgtattttttttttttttgaaacgggatattgctctgtcacccaggctggagcacagtagagctcactgtagtctcaaactcctgggttcaagcaatcctcccaccttagcctcctgagtactgggtctacaggtatgtgccatcatgctcagctaattttttgtattttgtagagacgaagtcttgctgtgttgcccaggttggtctcgaactcttcagctcaagcgatccccttgtctagtcctcccaaagtgctgggattataggcgtgagccactgtgccctgccagtttttgtgtttttttttgggggggtggtgggtggagggtatatattgcatggcatggtgaaaatagttaatagtgtattgtatatttcaaaatttcaaatgttcttgtcacaaaaatatttgaggtgatatgttaattagcttgatttaattactccatattgtgttaataactactttgtaccaatatatgcaactaaagtttgtcaatttacaaaaagaatttaaaaatcaaataaaatgggccaggtgcgatggctcatgcctataatcccagaatttagggagggtgaggtgggcggatcacttgaggtccggagttcaaaaccagcctggccaacatagcgaaaacccatctctacaaaaaacaatagaattagctggccgggcgtgggggctcacgcctgtaatcccagcactttgggagaccgaggtgggacggttggatcacctaaggtcaggagttccagaccagcctggtcaacatggtgaaaccctgtctctactaggtgggcacggtggggcatgtctataatcccagctacatggaaggctgaggaaggagaatcacttgaaccctggaggcggaggttgtagtgagttgagattgcgccactgtactccaccctgggtgacagagcaatacttcatctcaaaaaaacataaataaaacggttaaagtcctgtgttgcacctttgtgtaaatccttaccctctagggttttaaaatgttttaaatccttaaaacgttttaaggattacataatactggaaatcctccttgaaagtgtataaaagaaaaggaatatagtaagtttctttggttttggggccaagttttttttttttttttttttttttgagacagagtttcacttttgttgcccaggctggagtacagtggagcaatctcggctcactgcaacctctacctcccaggttcaaacgattctcctgcctcagcctcccaagtagctgggattacaggcaccggccactatgctcagctaattttttgtatttttagtacagacgaggtttccgccatgttgggcaggctggtctcgaactcctgacctcaggtgatctgcctgccttggcctcccaaagtgctgggattataggcgtgagccactatgcccggcccttgggccaattcttaaaggcctgttttattaatgaaagagatgaactaggccaggcgcggtggctcacacctataatcccagcactttgggaggccgaggcgggcggatcacctgaggtctggagttcgagaccagcctgaccaacatggagaaaccccatctctactaaaaatacaaaattagccgggtgtggtggcgcatgcctgtaatcccagctaccctggaggctgaggcaggagaatggcttgaacctgggaggcggaggttgctgtgagccgagatcgcgccattgcactccagcctgggcaacaagagcgaaactctgtctcaaaaaaaaaaaaaaaaaaaaaaagaggaactaaagcctctgaccatagcacttagtaaaggcagcttaactgccaaaacagcaggaattagggctttctgtatatatatatatatttttttaaggcagggtctcactctgttgcccaggctagagtgcagtggtatgatcacggttcatggcagcctcgacctcctgggctcaattgatccttagcctcctgattagctgggactacacgtgtatgccaccacccatagctaatcttttttttatatacttgccaggcagtagagggaacaaatactttagctttgagccatggctctccaccctaatggaacaataaaacgattaagggatgctaaaaaaatacagatgccaggcctctctcaggccaattcagaatctcaaagagggcagtgtagacatttaaagctgcccaggtgtttgtaatttgcagccaatgtggagaaaaccactgaactgggctggccacggtggctcacgcctgtaatcccagcactttgggaggccgaggtgggaggatcactgaggttcaccagttcaaaaccagcctgggccaacatggtgaaaacccctgtctctactaaaaatatataaaattaactgggtgtggtggcagatgcctgtaatctcagctactcaggaggctgaggcaagagaatcacttgaacccgggaggcagaggttgtagtaagccgagatcatgccactgcactccaatctgggtaacagagcaagaccctatctcaaaaaaaaaaaaaaagaaaaagaaaaaaaaaaaaaaaagaagaggccaggctcggtggctcacacctataatcctggcactttgtggaggcctaggcaggcaaatcacctgaagtcaggagttcgagaccagcctggcttacatggtgaaaccctgactctactaaaaatataaaaattagccaggcatggttgtgtgcacctgtaatccttgctacttcggaggctgaggcaggaaaatcgcttgaaccgaggaagcggaggttgcagtgagccgagatcccgccactgctctccagcctgggcaacagagtcagactccgtctcaaaaaagaaaaagataccaacacacacaacacacatcaccaaacatcatacgcgtttataaatgggggcgataggaaagggtccagaaaggatttgaaatgacttatgagtttcaataatttttttttttttgagacagagtctcgccctgtcgcccaggctggagtgcagtggcgcaatctcggctcactgcaagctcggcgtcctgggttcacgccattttcctgcctcagcctcccgagtagctgggactacaggcgccgccaccacactctgctaatttttttttagtagagacggggtttcaccgtgttagccaggatggtctcgatctcctgacctcgtgatccacctgcctcggcctctcaaagtgctgggattacaggcgtgagccaccgcgcccggcctaatttttaaataaatagagacgggggttgggtgtcactatttgcccaggctggtcccgaactccgggcctcaaatgatcctctgcctgggcctgtccaaagtgttgagattacaggcgtgacctattacgtccgacctgccttttgggtttttggtttttgttttgttttgtttaattgaaggttagggtgcctgacagtctgcgggatcgaactgggaggcaaattcagatttcgctgggggaacggagtgcgaagtgtcagggtagctggacgctaaactggcgcagctgcgcgcgcccgcgcgcgcgcgggaagagtcccagggtcattaacggaccatgggctgctgggaaacggcttaggagcagcacccggctggcgctggccggccggcgccggggactttcttccgcctggccagacagatccctgttttttgtttttcaaaattcagaaagcatctccgaatatttgcccagaggagtgtgaaacatactttcctggtctttctttcactttgttttatttctgtgtggacaaacaatggggaaaatgccgcgcgtctagccaggcagataagaaaacaactatacccgtcaggcccccaacccggcgccgccataaatggccccggcctcgccattttagttctttttgcgaagtgggctcgtgggttggcagtatgagagttgtaatggcccgactgttgagtgagggggagcaggggatcccaacggcttgcgctgcctttgcgcagcagccggcgggcggccacgtcgcggcctggctggggtaggagagggcggtccccagtgcagttgggtgaactaccgttgcacactggagtttctggtgtctttgcttggaactgacctagctcgtggcagggggaactcggctagcggccccacagcccctgctgactcaaaacaactgtgagtggggttgggcgagtgattgcaaaatgggggtggcggtcgcccggggataggaagggagtgatgatgaccccaggtaactctgagtgtgtcgctgatgccatcaccgcagcgctctgaccgccccctcggtccagcatttctcaggctcaacgagttcatggccaagattcctaatcttttgttctgtttcatttccccgttaggagttgtaagacgttcatcgccgtgttatccttgagtaaaggtgagtattaggtgcgagagccttttgaatgcctcttcggaaagctttgttcccaagcaagctttcgttcatgggcattatgcgcctccctgccctttttttttttttttttttgagacagtctcgccttgtcacccaggctgaagtgcggtggcacgatctcactgcaacctgcgccttctgggatcaagcgattctcctgcctcagcctcccgattagctgggattacaggcgcatgccaccaagcctggctaattttttgtattttttaatagataaggggtttcactgtgttagccaggatggtctcgatctgctgacctcgtgatccgcccctctcggcctcccaaagtgctgggattacaggcgtgagccaccgcgcccggccttttttttttttttttttttaagacagcctccctgtcaccctggctggaatgcagtggcaagaacacaattcagtgcggccttcaactcccgggtttaaccgattctcccaccttagccaattttttcctttttttttttttttttgagatggagtcttgatcttgttgcccgggctggcaatggtacgatctccctgcaacctctgcctcccgggttcaatcgattgtcctgcctcagcctgccgattagctgggactacaggcccgcgccaccacactcggctaatttttctgtttttagtagaaggggtttcaccatgttggccaggatggtctccatctcctgacctcgtgagccgctgtgcccggccactttttcttttttgagctataatccatgtaccacaggtggtgacttccatttgtttgtttttgctattttgtttttgagacagggcgcaatgccaggatctccctgcaacatccaccgtcagggctcaagtggtctttccacctcagcttcctgggactgcaggcacgtgctaccaccacgcctggctaatttttagtttttttacagaagcgggcttttgccatgttgtccaggctggtctctactcctgggctcaagcagtcctcctgcctcagtctcccaaagtgctggaattacaggggtgagttgctgcgtctggtgttggtgactttctagagattactttttggtttacatcattttccttgtgactatttttacttttttggggggcggggggacagtcttactctttttagtttacatcattttccttgtgactattctatttttacttttttagggggcggggggacatgagtctcactcatgttggtcaggctggtctcaaactcctgacctcagttgatccacgcccttcggcctcccaaagtgccgggattacaggcgtgagccactttgcccggcctgtatttttacgttttaataaatccccgtatttttgttaaaggctgggtaacctgactcctcccctcatttctactgcaaaataggagtacactggggcctcccagtggagctgttctctgctgttttaaattactttctactcctccctttctaacgtccactcctggactcatttgttagatcaatatatactgggactgttgtgttttctttgagtgtactagatctctttccagaagagcttcccttgatccagatctccctaattgggaatgatgatttcacagactagagtctccgatgctggtcatgatgtcaaaactaagttctgactcatttagggaactggatacttgggtctccagaagggccaatgggagggccataattctgtttattttcaaattgtcttgttttcaccttgttagaatgaactctggaagcccagccagggacaatgcaccttcacagagattctgcactaatctgagtgaaggtctaaggtttggaatctccccctcatggagagaagctttgtatggctgtcatgcttagacagtgattcctgcaacttgaccttcaggctgggagaggtggagagccatgcctgttctccttccttgctatggtgagtatcttttgttttggctctcagtgggagtggtaatgatgatctggttggacaagagtctctgagcttttctctgaggatctttgaacccacctgatccaccttcatcctgccggcaatctcctgtaattcatgtttttatggccagttacttacatgatgaggtttaattggctatggttctgcaggatgtacaggaagcatggtgttggcatctgctcagcctctggtgggggcctcaggaaactatattgcataaggtacagagggaagcagggatgtagcatggccagagcagcagcaaaggcagggaggtgccacacatttttaataaattgatctctagagaactgactgtcatgagcacagcatcaaggaggatggtgcttaagccattcatgaggaatccaccccagtgatccattacaattcaatatgagatttggtggggagacagatctaaactgtattacagggtctcactttgtgcacaggctggtcttcaactcctgcctcagtgagccactgtgccccaccccaacatgttttgtgtgttttttgagactgtcttgctctgtcatccaggctggagtgcagtggtacactcttggcttactgcagcctctgcctcccaggttcaagcaattctgcctcagcctcccaagtagctgggattacaggcatgcgccaccagtcccggctaatttttgtatttttagtagagggtttcaccatgttggccgggctggtcttgaactcctgaccaagagatctgcccaccttgacctcccaaagtgctcagattacaggtattagccaccgagcccagcccgcaacatgtatttttatttattttttgtttgagatggagtttcactttgtcgcccaggctggagtgcagtggcacattctcagctcattgtaacctcagcctcccgagtacttgggattacaggcatgcgccaccatgcccagctaattttgtatttttagtagagatgggagttttcaccatgttggtcttgaactcctgatctcaggtgatttgcccgccctagcctcccaaagtgctgggattacaggtgtgagccatagcatctgacaattttattctattttttgagacagtcttgctctgtcacccaggctggagtgcagtggtgcagtcacagctcactgcagcctcaacctcctgggtggaagctcacctctcacctcacccttggagtagctaatgacttacaggcatgcaccactatccccggctaatttttttttttttaaatttgaggatgggtgtggtggctcatgcctgtaatctcagctctttgggaggccaaggtgggtggatcacctgaggtcaggagttgaagaccagcctgaccaacaccgtgaaaccctgtctactaaaaatacaaaaattagctggg
